United States Patent Application Publication US 2026/0191916 A1 - sequence listing, part 84

SEQ ID NO: 582 - DNA, 5013454 bp, Blautia FBI02891 (residues 3,342,305-5,013,454 of 5,013,454)
  source 1..5013454: mol_type = genomic DNA
gcccaggcccagcacagcggttccgtctgtgatcacagccaccatattgctgcggcgggtatatttgtaggatagatccacatcctgtgagattttcacacagggctcggcaacaccgggcgtataggcgaccgccagctcttcaggggtgttgatgggggcgcggcagatcacttcgatctttccctgccactgttcatgctgctgcaatgcaaactctttcttgtccatagtactgcactccttttattcttttttattaataaaggtttttcactttaaaatctctctcggcctctcttctctggtccttcttggcaatatcctgacgcttgtcatagagtttcttgccccttgcaaggccgatctctactttcacaaggctgttcttaaaatacacctttaagggtaccagggtaagtcccttctctgccagctttccttcaattttgttgatctcatatttgtgaaggagcagctttcgcacccgcagaggatccttgttaaataggttccccttttcatagggactgatgtgcattccgtaaatatagacttctccatggtccacacggatgaaggattccttcacgctgcattttcccatgcgaagagatttcacctctgtcccggccagcgcaatgccggcctcaaaggtgtcttctataaaataatcatgataggccttcttattgttggcaatgagtttgattcctgcctgctttgccatttcaatccttctcctcccataacacaaaatccacggttttcgtcagggtatccgcatcggccacccggatcttcaccttctgtcccagacgataggttttcttggtaacctgccccaccagctcatactcttctccgtcaaacacgtagtaatcatcccgcagggtattcacatggaccaggccctccaccgtgttgggcagctccacatacattccccagccggtgacgccggagataatcccctcatagacctctccaaggtggtaagacatgtactctgcttttttcagcttgtcggattcccgctccgcctcctgagctctgcgctctgtggcactgcactggcgggccacctcgtccagaatttcctcgtagtgttccctttttcccgggcgggacatacggcccctaagctgatccttgatgatccggtgtatctgcagatccggataccggcggatgggggaggtgaagtgacagtagtatttggcagccagtccaaaatgtccggtacactgggtggtatacctggcctgcttcatagtgcgcagggtgaggcggctgatctgggtctcgttttcacagccctcaatgctctccaaaatggactggatctccttgggggagatctcctcctttgccttttgtactggaattccctgattccgcagaagggtgagaagactctctaccttctctggatcgggattttcatgggtcctgtatacaaagggaagcgcacctgtacagtattcctttgccactgtctcgttggccataagcataaagtcttcaatgatcctggtggccacattctgctcataaggtttgatatcaaccgctcttcccgccttgttgagaataatcttactctccgggaaatcgaaatcaatggatccccggtgatgacgcttttccctgagaatgccggaaagctcagccatgcggaaaaacagtggaatcaggtcagcatatttttccctggcctgatcgtctgtgttctcaataatatttttcacatctgtgtaggtcatcctggcagtgacacagatcactgtctccgctatctcatgggagatcacagttcccgagctgtcgatctccataagacagctcaaagccagcctgtcctctccctggttcagggaacagattccattggaaagcttcactggcagcatggggatcacccggtctgccaggtagacgctggtgcctctttttaaggcctcctggtccagagcgcttcccccctgcacataattgctcacatctgcaatatggacgcctaaatggtatatcccatttaccttggaaagagagatggcatcatccagatccttggcatcctctccgtctatggtgacgacctccagggaacgcagatccttcctgccctccaggtctgcctccagcacatggtctgcaattctgtctgcctgatttaaaactctctggggaaattctgagggaatcccgctgcttttcacaatagccagaatgtctgtgcctggcgcatggcagtttcccaaattctctgtgacaatcccttcagggctcttattttttgtgccgtaatccgtgatcttcactaccaccttgtcctggtgagaagctcccttggcgtccttcttggcaataaaaatgtccttggagaacttggggttgtcactgatgacaaaaccatagtcccgattgctctcgtaggttcccacaacctccgttatgccccgctccaggatcttcactacccggccttccctgcggcggccctccttcttatcctcaggagtctccaccaggatttttacccggtcctggtgtacggctgtgcctgtattttcctcagggatgaagatatcctcttcctccccttccacttccacaaaaccaaatcccttggcatggcctataaaagtgccttccatgtaagttccattctgcccggaagcgtcctcttcccccggctttctcagccggtatcttcccttactgtcagcgaccacatccccctcctctatgagggtctcaaggacctgatcaagcatttttctgtccggtttctttacatttaaaagcattgccagatctctaagacgcatgggtttgtagagagggtctgacaaaaactcccggatcacttgttttcttttttccactaatttattatctttcacaaaaactccttttttctttattatctccataataaggtaaaaaaacactcttgtaaatacaagagtgtttttgttggcttaaaactttaaatttaatacaagagccagcacgaagaacaaaacgcccataattgtcgtggctttcaccaagccgccttccatggaacgtcctttgttctttccccagtaggtatcagcaataccgccaatgcttccaagaccctgctgcttaccttcctgcataagaactactatggtaagggcaatacaatctattgcaaataagactgtcaatacaattcttaaaactcccacctttacacctcctaatcactaaggcatattgtaacataggaaaatgaggatttcaacagttttttcctattaaaacggcaaaaatctgcttctgcatttttattttgttgtcattcctattctgattccagcttgcggaattcttctgtatcaaagaaatctttcacctgtatccccagaccatcgcacaatttcatgattgtaaaaattcctggattttttgtggagcagttgataatatgcatcaatgtggtcatgggcactgctgatttgtaagataaaacataataagacattcgtttcatcttacataattcctttatacggttcgccaaaattttctgttctttcatttttctttggtatcctcccatttctattcctctattttatacctttataagacataattgtttccatatacggtatgtaaacgaaatttttttccggatttcacagtttttaggaatattattttattttcagcaatttgcataaaagaagaaattattctttttcgccggaacctattgacattttcctcatatcatattatcatatgaacagttattcatatgtttgttttatagagtagctgtatgaatggatcaagtctgtttgaaccaatggggtaatcaaccggatgggctgtgatgacagctttatggttatgaacgagcctggaaataggctaagaatatcctgtggacaatgtttttattataatttgaggagaaattcttatgatcaaaaaaatttatcttatggagaatctgggctgtgccaactgcgcttccaaaatcgaacaaaagattgctgccctgccgggggtacaggaggtttccatcacctttgccacaaagcagcttcgccttactgccccggacccggattctctccttcccaaaattcaggcgatcgccaacagcctggagccggacattgtaattaaggaaaaagggcggtccagaaaagccgcacctgctgccggaatagacaacgaagggaaaaacagtgccgctcatgaaagtccttcctgggatgtgtcggattcctgcggctgcggtcatgaacattctcatacccattctcatgatcaggaacatcaatcctgtggatgcggacacgaccattcccatgaccaggatcacgattcctgcggctgtggacacgaccattctcatgaccaggatcacgattcttgcggctgtggacacgaccattcccatatgcattctcaccatgaggaccacgattcctgcacctgcggtcatgagcattctcacgagaacccccaccacgttcccggacatccggcggactgtcagtgtgagctgtgccatccccatgaggaatactgcgatgtatgcggggaaagcctggccaactgcacctgccatatgcctgacgcagattgtatcaagaaagtatacattttagaaaacctgggttgtgccaactgtgcttccaaaatggagaaaaaaatcaaagagctgccagaagtgcaatatgcctccatcacctttgccaccaaacagctccgcctgtccgccaaggacccagacgccctgctcccactcattcaggacatctgttcctccattgagtcacaggtaaaggtggtaccccgtgtaaagtctcccggagcaactcagacacgcacctatctcctggagaacctggactgtgccaactgtgcttccaaaatggaagcccgcatcaatgagcttcccgggatcatcagcgctgtcatcacttttccaaccaagcagcttcgtgtcacagccaaagatccggatgccctgctggaagagatgcaggaaatctgctcctccattgaatcccagaccatcatcaaggccaaggataaccgccccaagagtccagatgtccttcctgtaaaggaggtcgtccccccggccagaaagctgccacaaaacaccaagtcgctcatagggatccttctgggtgccgccctgttcataaccggggaggttctggagcatctgggtatggaactgcctgccgtggctgtctttgtccttgcctacctgctccttggaggcaaggtggtcctcaccgcggcaagaaatataacaaaaggacaaattttcgatgaaaacttccttatgagccttgccaccctgggtgccttctgtatccgggaatatcccgaggcagtgggggttatgctcttttaccgggtaggggaattttttgaacatgtggcagtggaaaaaagccgctctcagatcatggacgctgtggaccttcggccagaggtggtaaatctggttgtgggagaagaggtgaaggtcattgacgcagaggctgccaatgtgggagacattctcctggtaaggcctggagaccgcattcctctggacggcgtggtcctggaaggacagagccgcatcgacacctccccggtaactggagaacctgtgcccgtgggcgtctcctacggagacgaagtgatctccggctgtgtgaatacctccggccttctgaagatccgtgtggaaaaaatcctggaggaatccatggtgaccagaatcctggattctgtagaaaacgcagccgccagcaagcctaaaatcgaccggttcatcacacgctttgcccggatctacaccccctttgtggtacttttggccgccggaaccgccatccttccatctctcatcaccggagactgggagcactggatctacacagcccttaccttcctggttatgagctgtccctgcgctttggtcctcagcgttcccctggccttcttctccgggatcggagcaggatccaaaaaaggcattttattcaagggcggcgtatctgtggaagccatccgcaatgtaaaggcagttgttttagataaaaccggtaccatcacaaaaggaaattttgttgtacagcatgccgtaccctttggcacagaaacccctgaccgtctgctggagctgtgtgcagcctgtgagctcacctccacccaccccatcggcaacagcatcgtaactgccgcaagggaaaaaggcctgaacatccaaagacccacatccgtggaagaaattgccggccacggaatccgcgccaccatcccagaaggtgagatcctgtgtggcaacaaaaagctcatggataaatttcacatttccataggggaatatgaaaaatcctcctttggaactgaagtttttgcagccctaaacggcaggtatctgggacacttagtcatctcagacaccataaaagaagatgccaaagaggcagtggctgccatcaaaaagcaggggatcaccacagccatgctcaccggtgatgcccaggaaagtgccgatgcagttgcccaggctgctgggattgatgaggtccatgccagacttcttccccaggataagctcaatgagctgggtaaaatccgttctgcccacggcgccgtcatgtttgtaggagacggaattaacgatgcccccgttctggcaggagcagatgtgggcgctgccatgggaagcggtgccgatgccgccatcgaggctgctgacgtggtgttcatgacctccagcatggaggccatcccccaagccatcgccattgccaaaaataccagcaggatttcctggcagaacgtgatcttcgctttggtgatcaaggctgtggtgatgatactgggcctggcaggttttgcctccatgtggatggctgttttcgccgacaccggcgtagccatgttatgtatcctgaactccatacggatcctttatcaaaagcattaaccggacttcagtttttcatccatatggagaaattcagcactgccgcaaagcagcaccacagcagatagggtatctgcaggcgggccgcccatacattcaccttggaaaactcggcggtcatccaaaaaacagcggcgatcaaaaccaggatccagaaaaatcccagcatataatttccaaaggtaaaaaaaacaaagctccagcccaggttcaaggcaagctggacacaataaggaaccagcacctccttcagcggacttcccgtttctttgcaggtctcatagacctcataaaaggaaagccccatgagaaggtaaagaacagcccataccactgggaacacaaagcccggcggactgaaaaaaggcttctttaaagcctcatagtccacccccatactccccgccagaaatcccgcggcggttcccaaaatcaaaggaagcagaacgaataaggcctgcttcctctgtttttgtctttcttcacttttcatatgatattctcccggcttcttttccatattttatgaaaaagccggtgaaaatataccccttaaggcagggatccccatgggatcatcccctagaattccgggagctctccgcattgaaaaggattttcataaaccgccagctcacccagatactcatggatccttaaaagctgattgtacttggcatttctgtctgaacggcagggagcgccggtcttgatctggccggcccctgtggccacagccagatctgcgataaagggatcctccgtctctccggaccggtgggagatcacagccttataacccgctctgtgggccatttctactgcgtccagagcctcggtgagggtaccgatctgattgaccttcactaaaatggcatttgccacctgaagcttgatgccgcagcgcagtcgcttaatatttgtcacaaaaagatcatcccccacaagctgaatctttgtgcccagacgctctgtgagaagcttccagccctcccagtcgtcttcctgaagaccgtcctcaatggacacaatggggaactcttccaccagggcttcatagtaatccaccatttctttacaatcccggataacctcttgtcctttcatcttactctcaccagggaaatagtacactccccggtcttcatcgtacagctcactggctgctgcatccaaggcaattccgatgtcttctcctggtttgtagccagctctttttacagcctccacgataagctccaggacttccttggaagaggccagatccggggcaaaaccaccctcatctcccactcctgtggaaagggaccgctccttcagggtaattttcagaaactggtagatctccgcacacatacgcaggccgtcgggaaaacactgggcgcccagaggcatgatcataaactcctgaagatccactgtgttgtctgcatgttttcccccgtttaagatgttcatcatgggaactggaagacggtgggtatgacagcctcccagatattggtacagaggcaggcgcatggcctgggcagctgctctggccaccgccatggatacccccagcatggcatttgcccccacgttgcttttgttgtctgttccatccacttccaggagcagagaatcaatatacccctggttcagggcattttctcccacaatggcatccgccagctttgtatttacattgttcacagccttttgtacactaagccccacataatttcctttttcctggtccctaagctccacagcctcaaattttcctgtggatgctccggaaggaaccatggctcttcctgtatatccattcaccccaatgacgccttctcccacagtaacctctacttcaacagtagggtttcctctggaatccagcacttgtcttccgtatacttttctgatgggtaagtaacgaaacatagatttacctcctgaattattcgttgcccttagtatggacaatccaggagaaaatatgactcattctgcttttttcgtaaattttatatattcctgcttatagtttccccagactgtacagggctgctttgtaaaataaaaagtagaaaacaacagttccatatcaataagctttgtggcaacttgaagcaatggttcatccaagggcagaaacagcccctgggccttatgtgcaagctttaagaccagcttctgttcctccacatccagtacagacagcactcttctctgtccttcttcatccaggtaggaataatagaaatccacaaaggaattctcctggccgttttcctccatcagcccctttaaataggatgctgcctctttctgtcccagatacaggctctttgcctcataatcataaaatccctgggtgatcttctcaaaataaatggctcccttttccaaaagctgttctaactccataccgtctgccgcctccttaattatcagaatattcatattttttgctttttcataactgttaattaaataaaatctttatttttttcaattttcttattgacattttaatctttgtctgctatactaacaacataaacaaaaggaactacaaaccaatacaaacctaaatcatttaaataaaggagtgagaccaccgaaaacttaaagtttcatcctataatttaaagaaaggaaggtacagaccaccagaagcgtaaagtaatcatccaaaaaacaaaattaagagaaaggatggtacagaccaccaagaacttaaagtaatatcttaaaccaaatattacagaaaggaaggtacggaccaccaagaacttaagtttttaatctaaaattctttattcaaattttaatttcgtaataaggaggtacattccattggacactgaatactaataagagctgttagaagaagtaatctgacagctcttattttattacatagaaaagctgcttcccagctgcaaattgcagtcccattggcaaaaaggggcattgccaacggcaacaccccacaaaatcctattcattttcttgtcttatttctccaccagaagggattttcctgtcatctctgcaggctgctccattcccatgagctgaatcaaggtggggataatatctgccaggcagccgttttcccgaagggtatatttgggatccgcattcactaagatgaagggaaccggattggtggtatgggctgtaaaaggctcgccagtctcatagtccaaaagctgctctgcatttccatggtctgcgcagataaacatctgaccgtctgtctctttcacagcctctacagctcttcccacacattcatcaaccacttcgatggctttcacagccgctgcctccactcctgtatgtccaaccatatccggatttgcaaagttaatgatgatcacatcatatttatcggacttgattgcttccaccagcttgtcgcacacctgataagcgctcatctctggctgcatgtcataagtgggaaccttaggtgattttacaaggatacggtcctccccttcattgggttcttccacaccgccgttaaagaagaaggtcacgtgggcatacttctctgtctcggcaatacgggcctgggtcatatgatgtgctgccaaatattccccaaaggtattctgaagctgaaccttatggaaagccaccagcttgttggcaatggtgtcgtcataatctgtaaagcatacaaaggtaagatccagtttcttgcttcttgcaaagcctttaaattcatcatcacagaaggctctggtgatctctcttgccctgtcaggacggaagttgaagaataccacagaatctttgtccgagatcacagtcaccggtgcgccgtccttctcaatcacagtgggaagtacaaactcatcggtttttccatcatcataggaagcctgtacggccaatgccccatcggttcctttcacgccttctcccttggtgagcgcgttgtaggccagctccacacggtcccagcggttatctctgtccatggcataataacgtccggataccaccccgatctctcccacgccgatctctttcattttggcctgaagctgctggatatagcctttgccagaagatggaggagtgtcgcggccgtccaggaagcagtgtacatacaccttgctcacaccttctctttttgccatttccaaaagtccgtacagatgtgtattgtggctgtgtacgccgccgtcagagagaagtcccataaagtggatggcggaatcgttgtccttggcgtttttcattgtagccagaagggcttcattcttaaagaagtcaccgtcctggatctcttttgtaattcttgtaagctcctgatatacaatacgtccggcgcccatgttcagatggcccacctcagagttgcccatctgtccgtcaggcagacccacagccattccgctggcatagccttttacaaaggggcactctgccataagcttgtccataacaggtgtgtttccctcgtaaacagcatttgcgtcatgtctttcattgagtccgtaaccgtccagaatcattaaaacagttggttttttactcatattttctgttctcctttatttaaaatcatcttttagcaattttcctactcttatatactatcaaaaatcctggatttttcaattcttttcttctgaaaaatcctggggcttttatttataaactctcagacagttggatacttcgtggacagctgaggaattttcaatctcctccactgcctttctcatatccccctcccgtacctgggaggtgatcacaaccacctcggcgcaggaatcttcctttacccccttctgcacgatctgggccacactcacatggtgctttgcaaaaatgctggtcatctcagccagaacaccgcagcggtcctccacctggactctcaggaaaaagcggttgctggtgtccttcatgggcttcaccggaagctccttataacaggtgcagccaatgcggctgcagcagcctgcctggatatttctcacaatgtcaaacacatctcccgccaccgcactggctgtgggaagctctccggctcctctgccaaagaacatggcgtcctccacagcatctccgtggacaaagactgcgttataggaatcgttcacagatgccaggggatgggtgctgggaatgagcatggggcacacataggcctcaattccctccggagtattctttgccattccaagaagcttgatgtcacagcccatttccttggaatacttaatatccgtggccgtgatcttggtgatcccctcaatatgcacatcgtcaaagaccaccctggaattaaaggccacactggccaggatcgccaccttgcgccctgcatccagaccttcaatatctgccgtgggatctgcctctgcataacccagctttgtggcaagggccagggcgtcagaaaattccattccctcctgggtcatcttggtaaggataaaattggtggttccgttcacaatccccataacctctgtcatatggtttcctgccaggcactgctttaatggcatgataataggaatgcctcctgcaacagccgcctcaaacagaaagtccacctggtgaagagcagccatgtccaaaagctccttgccatggactgcaatgagatccttattggcagacaccacatgcttccctgcctccagggcctgtaaaatataagttttcgccggttcgatcccgcctatgagctcgatgacgatggaaatgctttcatcctggcggatgtcctcccagttatttgtgagaatggaggggtcctccaccttggctgcggctttctccaggctgcgcaccataattttcttgatcactacttttgcgccgattttttcctgcatttctgcttcctggttcttcaatactttataaacgccggttcccacggttcccagccccaacagcgcagcataaattacttgttctgccatacgaatcttcctttcctacttccatattgcctttatcttaggctaggaaacagggtttgtcaagtatgggtgcctgcatttcatcatgaaacgtgcagatctggatgagacagcttctcccaggatcctgtgtttcacagcctttttttcaggttctccttttccaaacagtcttttcagggtatactgatcttagacaggaatttagaaaggagctttttctcatgaatgtatttgatattttaggacctgttatgatcgggccctccagctcccacacggcaggggcagtgcgcatcggccggatcacccgggccctgctctgtgagccgcctgtttcggccaagatccttcttcacggctcttttgccaaaacctacaaaggccatggcacggacaaggcgctgatcgccgggatcctggatatgcccacagacgatgaacgcatccgcttttccccagatgttgccgcaaaagaaggtctaaaaatctccattgacaccaaagaactggacggggcccaccccaacactgcccagatcaccctcactggtatctctggaagacaggtgagtctgcgcgggagcagcatcggaggcggaaatattctgatcacaagagtgaacaacatggaggtgtccctcacaggacagcacaccacttttattgtgctgcacaaggatacccccggtaccattgcctctgtgacagagcttttggccgaatatggggccaatatctgtaacttccgcctggcccggcaggaaaaaggtggacaggcggtcatgaccattgagacagacggaagcttccggcaggagctgaatgaccgggtagccgccctggataacatctattccagcaccctactccaacccatttaactccatgtgacaaactgcttcctattataataatgaaaggatattataccatgcccatagatttcaattatgattccctggcagatctggtatctgccgccaaaaaggaagagtgtcttttatcccagcttgtactgtcccagcaggctgcccagatggagctgccccaggaacaggtctatgaaaaaatgaaggagaatctgctggtaatggaagcctgtatccagcccggctgtgacaaagatttaaagagcaccagcggccttaccggcggcagcgcctacctgatgaaaaagcagacccaggccggtaaaaatctcaccggccccctgctgggaggggctctttaccgagccctggccgtatccgagctgaacgcggccatggggcgtattgtggccgctcccactgcaggaagctgcgggattctccctgccgctgttctgaccatgatggaagagaaacatctgtcccaaagggcctgtgtcatgtccctgttcactgcctctgccgtgggtatggtcatcgccaacaatgccaccctctccggcgcccagggcggctgtcaggcagaatgcggctctggcgctgccatggctgccgcggccattgtggagctggcgggaggtaccccggacatgctggaggccgccgttgccattgcattaaaaaatgttctgggactggtgtgcgaccctgtggcaggtctggtggaaattccctgtatcaaacgaaacgccgccggagtcaccacagccttcatggcagccgagctggctttggcagggatcaccagtgccattcccgcggacgaagtgatctggaccatgaaaaagatcggagattccatgccctgctctctgaaggagacggcagagggcggcctggccgcaacccccacaggaaagcgccttcaccgccaggtattcggagagatacccccttccggctgcagcggctgtaaatcctaaaaggccacagaagctgccccggcagcatttccacaaaaaagaagtactcctcagccggttttggctgtgggagtacttcctttttgtccctgtgacaggacgagaataaaatatgggaaattttatgtgtgctgtttatttatattctgccgggtaaacaagctctgactcagcaatgtcatatggccagatcggaacatatttgccatcctggatctgggtaacggtaagctttgctgccaggttctggttcaggtatggagttccgttaaattcgtcctcatcaaaggaaatcttgtcataaggaagaatgatctcgttgccgttggagaatttctcattgatctcaatcttggacagctcttccttgatggactcagagttgatctcttctcctgctgctttaatgttcttaaaggcatcgatcaatacccatgtggtggtgtaagcttctgcagagtggccgttcatgtcttccccgtacttctctgcatatttttctgtgatctcttttcccttagatcctactacaaactctgtggcaaccacaatcccgtttgccagagagtcaacacccttaagataagcgctctctgtaaagccgtttgctttgcagatgatcatgttgggcttgtaaccctgctcattgagggtatttgtaaagaggatggcatcagatacatagctgtctgcaatcaccacgtccggattcatggacttcagctgaaggacttcagaggaaaggtctgcagcaccggaggtataaaggatctctcccaaatactcaatatcattttcttttgcccaatattctgcccactcacaggtctgctgtccaacctcagagttatcggtaaagactgccacactctttccagccacattgctgtctttttcagaagcgtctttaatatagtcgatcatgtcacgaacgaacatcatattggtaggtgccagacggaagaagcactcatatccgttggatgtcagggagtctgaggttgcatttgcagtgatcagcggaacaccatactgctctgcgatctgtgccacagtaacggttacgcctgactggtagcagccgatcagcatatctaccttctcctgggtgatgagacgctctgcctctgacattcctgccgcggaatctcccttggaatcaccgtagataacctttacctcctgtccgtcaatcccgccttcttcgttgatctcctccagggccatatcaattccctgctgcatggtccttccggaatcagccagatcacctgtcataggataaactgccccgatcacgatgggatcatcatctgcatatacggtgcttcctccaactgcaaagcaagataccgtcaatgctgctgccattaccactgccatttttttctcaacataaaaacctacctccattttttatttattttcccggcccattccgggtaaaatacaagtttccgggtcaatgcccgtgcttccatatactgcttaccccaggctgtctgttctcctgcttttccaagggatttttctggtccccatgtcagattcccagataagctttctttatatcttcattgttcatcaattcctgcgccgttccctcaatgctgatgatgccgttttccagcacatagcctctgtttgccagtctcagggcttttcgcacatcctgttccaccaagatgatggtcagaccagactcctctgatacccttctggcaatattgaaaatatcatctacaatattgggggccaggcccagagagggctcatccatgagcagaagcttgggcagtcccatcatacctcttgaaaaggccaccatctgctgctctcctcctgacagggttcctgccagctggccggcccgttcttttaacttgggaaaccaggtatataccttttccagagtatccttcttctttgccgcagattctttgctgcaagcccctaattccagattctcatacacagtcatctgggggaaaagctgtcttccttctgggcagagaatcaccccatggtcaataaagtttctgcagcttcctcctgtcaggtctgttccgtcaaagcggatggtacccccgcaggtctttactaagccgctggctgccttcacagtggtactttttcctgctccgttgcttcccaccagggctacgatctcccccttagctgcatggaagctcacgtcccacagtacctgaatgtctccatatttcacactgaccttgtctacctgcaaatagttctcactcatttacccttcctcctttccaagatagatttcgatcacatatggatcattcattacctgttccggtgttccctctgtgattttttccccgtggtgcataaccaccacttttttgcacaggctggcaaccgctctcataatatgctcaatgagcagaatggtggttcctttttcattgatcttctggaacagctccactgcctcgtctgtctctgtgggatttaatcctgccataacctcatccaggagcagaagctccggatcagtggccagggctctggctacctccagccttttcttgtagggagttcccatgtccttgggatacagatctttcttgtcatagagtcctgtaaactccaggatctccagggcatactctctggcttcattggcttttttcagatttttccgtccgaagatggcccctgacgccacattgtccagaaccgtcatgttccgcagaggcttcatgatctgaaaggtacgggcaattcccatctctgtatacttgcaggccttggtgccggtgatatcttttcctttatagataatgtttccgctggtggggatgagcacaccgctgatcatgttaaacaccgtggtctttcctgccccgttgctgccgatcattcctgtgatctcgccctgttccacagtaaagctcacatcacttactgccttcagccctcggaagtttttcgtaaggttcttgatttccaacatttcagacataaccatcaaccctccttctttttgccaaaccaggccagatcaatctcatcgaacttgccattgatttttttctttaatttgctgtggtcaaaccatcccataattcctgtgggctggaataagatcacggcaataacgatcactgcatacaccaccaggtttaaccctcctgcaatggaggacagggatgcgttgaggaactctgataaaggtgtcaggatcactgctcccagcagaggccctgtaacacttccgataccgccgatgatggcaggcatcacataggtaagaccctgagactgttttaaaatatccggattgatgtatccgatatagttggcatagaaaacacctacaatggcgatcattcctgcgctgataaaggtggcgataaacttatacttaaagggatcgatccccacggcatttgccgtaccctcatcctcacggatggttttaaaggcatagcctaatttggagcggtcgattttctttaatacaatgtagaaaacaatcagcatggcaagggcaatgtaataataaggaaccttggagatccatctcatggaatagatccctgtctccttcatggggatgaggatcccctgtccgcttcctgcatattcccagttggtgaacaggtttcggaaggcctcggtaaatgcgatggttaccagtgtaaaataagggccggaaagcacaaagcagggagccagcaaaacagcggcgatgatgcctaccacaaagaacaccaggatcatactgatccagggactaatatgggcattgttcatgagcagagcagccatataggctccaagtcccataaagcctgcatgcccaagggaaatctgtcccgtgaggccgcccagcacactccatgccaaagtacagcagccaatataaaaggttgttacaaagataccaagaatataaggtgtattcactgccagcgggatcaatgctacaatgacaatgagcaaggctgccaggatataacgtatactcagttttcctttcatgtccattacccccttctctttttaatattcagattctctttcacaacaagaatcagaataaatgcgatgaataccagagtatccttaaacgcagcgcccacaaccgcagaccccaccgtctccataacaccaagtccgatacctcccaaaaaagcgcctacaacgcttccaagaccgcccatggtcacaacgataaaggatctggtaccgtagatatttcctactgaaggatagacataatagtaggacatcaggcaggctccggcgataccggcaatggctgcaccgattccataggtacatgcatagatgacttttgtcttgataccggttacctgtgcaccaacagggttctgagaggtggcacggatctgttttccaagcttagtgtgcttgagcatcaggaaaataagaacagtggcaacacacagtacaacaaagcccagcagcttgggaatactgatgttcattcctcctatggatgctacctgattggaaaaagcgctctttactgtacggtaatcggatttaaagagcagcagtgctgtgttggataagaagattcccagacagcaggttaaaaacaatacgttctggtcaccgtcctcttttatggaccgtgtgatcagggtggtctggatcaatgccccaagtccgaacatgatcacagcaaccagggggatggccacaaagggatccagtcccagttctgaatagaacagataggttatgtacatacttaccatcagaatttcgccctgacagaagtttacaattttcataactccgaagatcatattaaggctcataccgatcatggcatagataccgcccaccatgacgccattgataattgcctgaattaatatttctgcactcatttcaatttccctcctttattttcccaaatatcctccgtccaccgggatcaccgctccggttatataagaagcggcatcagatgccaggaatacggccagcccctttaagtcctccccggttccccatcttcctgccggaatccttctggtgatctcctcatactgccggaaatctttttctttgatctccgcagtgagctttgtttccatgtatccgggggcaatggcatttacatggatgcctctgcctgcccactcgttggacagagccttggtaagctgggcgatggcccctttggatgcagtgtaggcgggaatcctcacacttccgaaaaaggacgtcatggaagcaatgtgaatgatctttccatatccctgttccagcatcaccttcccggccatctgatccaggtaaaacacagcgtttagattcacctggaggatccgttcccactgctcctggggaaattcctctgcaggagcacggtactgggttccggcgccatttaccagaatgtccaccctaccctgaaagatttccatacattcatcaaaaatcttccccagggcctccttgtctgacaaatctccagtcaccccataaacttctgccccctggcttcccatctcccgggctgtatccagggcagctttggagctgcccaccaggatcacctgggccccggagtcatgaagcccctgggcaatgctccggcacaggcctctgcctccgccggtgacaatggccttttttccgctaagatcaagattcatagactcctccacctgcattcccaaggatcattccgatgcgtacagcccggaatattctctccgacgccttctccagatattctctggaattctccatggcgtgggccacattcatgggtctgcacacgcaggcctccatactgcccacccctacctcatatacctgtgcggcattgtctgcgatggctccggcaatggcgatcaccggcttttgatactgcccggcccgtctggagattccatcaatcacctttccacacacagactgattgtcgatctggccttcgccggtgacaatgagatctgcccagcgcaccttgtcatcaaaattgcagatgtccaggatagcttcgatcccccgctttaacttagcctgtgtgaacataacaagcccccatcccaggccgcctgcagctccggcacccttctcccagcggatatcccggttcatctggctttttgcaagatctgccagatgctccattccctcattgagagcctggatctcaatctccccggcacctttttgaggaccatagatattggcagctccttcaggaccgtaaagaggatttgtcacatcacacatgactacgatctctgtatcccttaggcggctgtccatcttacttaagtcaatggtggctatatcctgaagcgccccgcctccccacggtacctcctgtccgtttttgtcccggaaggaagcccccagggcctgggccattcccacgcctgcatcgttggtggctgaacctccaatgccgatgcagatgttccggcagcccttgtccagagcggccttgatcagttctccagtgccgtaggtggtggccttcataatatctcgttcttctgtgtcaaccagtgtaagtccggatgcctgtgccatttccaggacagcggccccgttttccaaaattccgtaagtggcctgcgtcattcccccatttggtctgtgtacctgaaccgtctcataacggcctcccaaattattgatcaacgcttccacagtcccctcgcccccgtctgcaatgggcatgatctggaactgagaatcaggaaaaacctttaaggctcctgtctttatctgctcagcaacctgtgccgtactcaaacttcctttaaacgagtcagaagctatgagcattttcactataacagcacctcctgtttcctgttgtttttgtgttaatgacgttaatccctcactctttttcactactttttatgcattttgtataacccccattatatcagcgtcactttttcgactcaatattacgggtaccaaacataagcgtctctttttgttacaggtaacaccaaaattttccagcggcttcttgtactctcacaggcttctggataaaaagaaaaagcgatgggcagctgcatcctgtccatcgcttggtatccttgtccggccttttattccaccatctcactgagtaaaatagctatgtagagatagatggcctcatttaattttctggggtcataccctgtcacatccttgatttttgtgagccggtactggagtgtatttttgtggataaataattcctccgctgtccttgacagagagccttcgtttttcatataacacttcaggcactgaatcatctcccctctctcatcgcccctgcagcagccccagatacggttcatataactttttctcttctccagaggaatgccggagaggagaaagcgcaggtctgtatcatcatattccatgatccggcttccctggagctgacgggccagaacacaggcagcctcggccgtcttataggactccacgatctcctccttcttctccccaggaatcccaatgccgctgtagattttgcaggaaaaccgtttctccacctggctgttcagctttatgacctcattgacaatgtggtggtcctccttaaggaacaaaatatcccggttgcccatggacagcacaagctgctgggcatcctcctccaccttgttccggaactgcttggcgatctcatcgtactcctcctggatctggatattttcctttctcttcccaggggacaaaaggatttccgaaaccacgatccttcgcctcagccgtatgtcaattcccaaaatagagctgctggcctgaagattttccttatcctttccaaagagccactcaatagccatattttttctcatattttcccgtgtacgactcaggctgctccggtaccggtccataatgagcatctctgtcattctgcggataacctcccccagaactccgatttcctggtaattccctgtgattcccacaacccccaccacctgcttgttcacaattaagggatagttgatcccgggccgtgtctctcggtctgaatcctcctccttgataacctgtagatccagtttctcttcaatgatcttcttggcccctttatggagcatgccaatacgggatgcatctttgctggcaatgatgtatccctcttcattcatgatatttacgttttgattgatggtatcgccgatctcatcaacgatactctgcatctgttttgcggataacggcaaaggccacatctcctttccaatgatgtccctcttttttgcatctgttttaacgatgtgactgcaccttccgcagatattttaaattattttcttttcctgtaacgggcggtagaactgcggacaacaaggtccggatttaaaatgatccgttccgcctccatctggggatcctggatccgcctggcaagtacctttaccacagccttccccatctctgtcacgttctggtccacgctggtaagcggaacctttccccatgccgcaaattttgtgttgtcaaagctcaccaatgacagatcccgggggatttccagcccctctgccatacaggtggccgcaaatcccagagccgtggcatcattcacagcgatcagcccggatggcttctgctttttctccaaaaactcccaggcgatcttctcaccggactcaattttcatgtcactgtagaaaatatcctcttccctgatctccaggccataatttctcatggcctgacaatatccctcaaagcgctgccgggaggctgaggaggaggtgtgcccctttataaagccgattctttcatggccaagctcaatgagatgcatggccgcaatatatcccgccttgaaattatccagaaggatgagatctccctggaaagaattcagaatacggttcaccaaaacaaccggaacctccatgtgttccagctctttattaatcttctccacctgggtggtcatcaagatcacccctgcaaagcgaaatctcttcagggcctggagaaattcaatctccctgtccacacagtactctgtgttgaacaccatcatcatataaccctgctcgtttaaatatttttgaatataaaatgccagctccgcataaaaaggattccggatatctcctatgatcaaagccacgattctgtctctctcgttttcctggtgactcttgctgttgggctcatagccgatctcctgggcatattcaacgattcttctgcgaaccttttcactgacgccgggggaattgctcaaagctcttgagacagtagaacaggagactcccaaatcagcagcaacatctgtgatcgtatattttctagccatgttctcttatttatacccctgtaatatattatgattttgcattactaccttatttcttttattataacttcctcctccataaaaatcaatcctgcctttcgttatatttgcgcaaatattttctttcattttcgcaaattattttttagtcttttcattcagatttgttttcccctgcttatttgtgcatatttccagaaaaaattccagttttttcatgaatattgtctatttaccaagttgagtttctgggttatgatgaaaacacgttaaaacctctttgcaccgttacgcaaatattttagttattttcttttatcactatgacattttggagaaaaaatcatgatatgtggaaatgaattatggaacgatcattttaaatcccacacagagaaacagatttaccacggctgcgcctttgatgtttatccagggctgccgcccaccccgtatgccgccctggttcaggccggggaagacagcggtgataaaactgccattgtcagccaggagagaagagaatatacctattctcaatttctgaacctcacggaccgtctggcctcccacctgtacacagagctggggatccggcccggagaccatgtgggtctccttctgtataacaccattgaattctgcactgccttctttgcagtgaataagcttggggcagtgactgttccccttcccgggaaattcaagcagcaggagcttttgtcccttatggaaaaagcaggacttcagcttcttatctgccatgaagactatgaaaagtggtttgccggacaggaacagctttcctgcagactgttggtttccagggacaaggaaggctgctacggtttttcatatgccatgaaggaagacaccccatgtgcaccggccatcgtaaaatctgatgtgaccgcagtgcttatgttcacctccgggactactgcccgaagcaagggtgtgtgtattgaaaactatagtatcctccatgctttggcctcttaccagaaggtcttgcatctcaccaggcaggaccgtacccttctggccgtgcccatttatcatattacagggcttctggccatcttagggcttacggtattttgccaaggcacggtgtatctgcagaaattctttcatgcagcccaggctctggaggcgatgagggactataacattacttattttcacgcatctcccacagtgttctccatgctcctccaggaaaaagagcagtttcccgctcttcctgacatgaggatcctggcctgcgggagcagcaacatggcaaaggaaaaaatccaaaagcttcaccaatggatgccccaggcacagttccgtactgtatacggacttacagaaactgcctcccctgccaccatcttcccctgggacgcggcccagagccctcacatagggtcctcgggacttcccatcccggggctgtgtataaaaatcgctgacgacaccggcagggagctgccctgtatggaaacgggagaaatcctcctgaaagggaccaatttatttaccaggtatctggacccttccataccggcttacgacaagggctggttccataccggggatttaggttatgtggaccaggagggttatctgtacatatccgacagaaaaaaggacatgatcaaccgaggcggggaaaaaatctgcagcttcgacgtggaaaatgtcatttacaccatggagcaggtggaggaggccgctgttgtgggcattcccgatgaaatctacggggaggttgccgccgctgccatcgtcctgtctcccggtgcttctcttaccttagaggagctcaccgactacttgaaggcacggatcgccaaatacaaaatccctgcaaaattactggtgctggacaagcttcctgtaacgcccagccaaaaaacagataaaaaagcaatcagacaattattcaccactaccaattaggaggtatggattatgaaaaaacccgtctttctcacaggagacgaggccgctgccttgatcaaggacaacagcaccattgccaccatcggcatgacgctggtttccgcatcagagaccattttaaaggccattgaaaaacgttttctggaaaccggttctcccaaccacctgacccttgtgcactcctgcggacaaagcgaccgggacagagggatccagcatttcgcccacgagaccatgctctcccggatcatcggcgggcactgggggcttcaaccgaaaatgatggacctgatcgccggcaacaagattctggcttactgcatcccccagggacagtttgcccagctctaccggagcatggcagggggagaacctggaaagatcaccaaggtgggtcttggtactttcattgacccccgtttagatggcggaaaaatgaacgacatcaccaaaaatgccccagacattgtggatattgtgaacattgacggggaggaatatatgcgctataagcctattcccctggattactgtattatccgcggcacctatatagacgagctggggaacctgaccacagacgaggaagccatgcagctggaggtattctctgctgtcatggcctgcaagaagtttggcggcaaggtcattgcccaggctaagtataaggttcagtccggaacccttcactgcaagcgtgtgaccgttcccggaatcttcatcgacgctgcggtgatctgccccaacccagaggaggatcaccgccagacccacagctttgccttcgaccctgcctactgtggagacatcaaggttcctgccggagcctctgacgcccttcctgccagcgtgcgcaaggtcatcggacgaagagccttatgtgaacttcatgcagacgatattttaaatgtaggcaccggcatccccaacgatgtggtaggccccatcatcacagaggaaggcgcctctgaggatgtgaccatcacagtggaatccggtatctatggagggatccctctgggaggcattgatttcggcattgcaaaaaataattttgctttggtccgccatgatgaccagtttgacttttataacggggcaggggtggatgtgacctacatgggtgccggagaagtggatgcccagggaaatgtaaacgccaccaagctgggaccaaaacccacgggagccggcggcttcattgatatcaccaccaatgccaagcatgtggtattctgctctaccttcacagggaaggggctggaatgctcctttgaaggagaccggcttcacatcaataaagaaggccagcttattaaatttgtgaacaagatccagcaggtgtcctacaacggggagattgcccggaaaaaaggacagaaaatgcactatgtgaccgagcgtgcggtcttcgagcttcgcccagagggccttgtgctcacagagatcgctccgggcatagacctgcagacacagattcttaaccttatggaattcaagccaatcatcgcagatgacctgaaggaaatggaccctgcccttttcagggaaaacgggccctttggacttagaaactatttatataaataaacaggagggaattgaatatgaaacgactggaaggaaaagtagcacttgtaacaggagccgccagaggactgggaaaagggatcgctcttaagctggcagaggaaggcgcaaaagttgtcatcgccgatatggctgccgctgatgaggcagtgaaagagattcaggagctgggaggcactgccgccagctttcaggtaaatatctccaaacaggaggaagtaaaagccctcttcaaatttgttgtggacaccttcggcaccctggatatcatggtaaacaatgctgggatcaaccgtgacggaatgctccacaaaatgcccgtggaaaactgggatctggttctctccatcaatctcaccggaaccttctactgcacccaggaagctctgctgatcatgagagccaaaaattacggccgcgtgatcaacatctcctccggaagctggctgggtaatatcggccaggccaactatgctgcatccaaggccggtgttgtggggctcaccaaaacagctgcaagagaaaatgccaaaaaggggatcacctgcaatgtgatctgcccaggctttattgagacagatatgaccctgaagctgaaaactgtaaacgagggcgccgcctgggacagcatgatgcagcggatccccatgggttatgcaggcaagccctctgatgtgggtaatatggtagccttcctggcctccgatgaggcagcctatatcacctctgaggtgatcaatgtgggcggcggaatgatcgtataagaaaaaaaggaggaagaaatcatgtgtgattgtaaagaagttgtaattgtaagcggctgcagaactgccgttggttcttttggaaaaagcttaaaggatgtatctgccattgatatgggtgctttggttgtgaaggaagctgtaaaacgtgcaggcatccagcccgctgacgtggacgaggccgttgtgggccaggtgggtcagatcgctgaaaatggctttgtggccagggccatcagcctgaaggctggtcttcccaaggaaaccgtagcttattctgtgaaccgccagtgcggctccggccttcaggccattgtagaggctgtgatggagatccagaccggacagtctgaggttgtggtagcctgcggtacagaaaatatctcccagctgccctactatgtgaaggatgcccgctggggcgcccgcatgggacataaaaatttcgaagacggggtcatagacattctcacctggcctctggacaacagccacaacggaaccacagcggaaaaggtggcagaacgctatcacgtatcccgggaagagcaggacgccttcgccctggaaagccacaaccgggctgtggcagctatcaaggccggcaaattcaaggatgagatcgtacctgtggagcttgtggacagaaaaggcaatgtgaccatctttgacacggatgaaggccccagagaaggccagtccatggaaaagctggccaagctgaaaccctgctttgtaaaaggcggaaccgtaacagcagccaactcctccagtctgaacgatggtgctgccgcagttgtagtcatgtccagggaaaaagcagaggagctgggcgtaaaaccccttctgtccatcaagggttatgccgttgccggctttgatccggaatacatgggctactctcccaaattctccagcgaaaagctggccaagaagctgaatctgaatttaaaagacattgacatgttcgagatcaacgaagcctttgccagccaggcttatgccgttgccagagacctggagctggatatggataaggtgaacatctacggaggcggaatttccattggccatcccattggagccaccggctgtgttctcaccgtgaaggtactctatgaattaatgcgcactgacaaaaaggacgctatgatcagcatgtgcatcggcggaggccagggtatttccatgtacttcaccaaatgctgataaaaatgccgccatggaaacttatctgccgataaatctccttttattgcataggaaagttcggagaactttcctatgcagcaaagaaagagggctgcccgccaatgaccaaaaagtcacaagcggccgcagccctctttctatgtcactattatttataattcacgatctttccaaaatctggcttcagggaagcgccgcctacaaggccgccgtcaatgtctgcctgggcaaacagttccggagcggtggctgcgtttacagatccgccgtactgaatgcggatggcttctgctgttgcctcatcatagatctctgctatgcaggcacggattcctgcgcaaacttcctgagcctgctgagttgtagcggtttttccagttccaatggcccagatcggctcataggcgatcacggcagtttttgcctggtcggctgtcacattctggaaaccaaccttcacctgctgacggatgaagtccatggtcacgccctgctctctctgctccagagtctcaccacagcacataataggagtgatgccgtgctcaaatgccttcagcattttcttatttacggtctcactggtctctgcaaagtattctcttctctcagaatgtcccagaaccacatatttcacaccagcatccaccagcatggcgggagcgatctcgcctgtgtaagcgcctttttcttcgtagtacatgttctcggcgccaacctggatattgcttcccttgcaggcctcaactacaggaataatgtcaatggcgggcacacagaataccacatccacttcctcatttacaaccagaggtttcagggtatttaccagctccactgcctctgacggggtcatgttcattttccagttaccagcaataattttctttcttgccattgttttgttctcctctttttttatatttaccttcctcaaagaaatcccccgctgttgtgtcacaaggactatacggcagatggagatactttgtatagggagccggtgacagggctcccctgaagtgttttatttatcgtttgctgctgcaacgccgggaagctctttgccttccaggaattccagagaagcgccgccgcctgtggaaatatgagtcatcttgtctccgtagcctaaaatgttaacagctgctgcagagtcaccgccgccaataatggtggtagcgtctgtgtcagccaaagctttggcaactgcctctgttccatgggcaaagttgggcatttcgaagcagcccataggtccgttccatacaacggtcttggcatcttttacagcgtctgcaaagattttctcggtctccggtccaatatccaggccttcccagccgtccggaatttctcccctctttacaacctgagagttgcagtcattggagaagtcgtcgccgatgcggttgtcaacaggaagaagaagcttcacacccttctcttctgcttttttgagcatatccagtgcatactgcagataatcatcctcacacagagaattgccaatatgtccgcctcttgccttggagaaggtgtaggacataccgccgccgatgatcagcgtatctactttgtcaagcaggttgttgatcacggagattttggaagaaaccttggctcctcccaggatggcaacaaaaggtctcttgggattgtccacagcgtttcctaagaaatcaatctctttctgcatgagataaccaaccactgcagtgtccacaaactgggtcacacccacattggagcagtgtgctctgtgtgcagttccgaaagcgtcatttacaaaaacatcacacagggaagccagttctttggagaaggcttctccgttctttgtctcttcgatacggtagcgggtgttctccagaaggatcacctcgccgtcattcatggcttccactgctgcctttgcgtttggtcccacaacctcaggatcagcggcaaattttacttcctgtcccagcagctcgctcaggcgggcagcaaccggtgccaaggacagctctggttttggctctcccttaggttttccaagatgggagcacaggatcaccttgccgccgtcagcaattaactttttgatggtgggaagggctgctacaagacggttctcatctgtgatcttgccatcctgaagaggaacgttgaaatcacagcggaccaggactctctttccttttacgttgatgtcatcaactgatttcttattaagcatatttaatgcctcctttgattatttgcataagccgctgtctcacaggggctttccatacacaaaatgcaaaaagggcccggtccaaatcagaccggacccctcactgagtctatactactttccagttcggattatgcgttcagcagtttgccgaagtgtttgatggtacgaaccatctggctggtgtaggagttttcattgtcataccaggaaattacctgtacctgagttgttccattgtctaatggaagaaccatggtctgggtagcgtcaaacagagaaccaaatctcatgccaatgatatcgctggatacgatctcgtcttcgttgtagccgaaggactcattggaagctgctttcatagctgcgttgatctgatcttttgttacgtttccttctacaactgcagttaagatggtggtagaacctgttggggttggaacacgctgtgcagcgccgatcagtttgccgttcagctcaggaataaccaggccgatggcttttgcagcaccagtgctgtttggaacgatattaacagctgcagcgcgggatcttctcagatcgccttttctctgaggtccatccagagtcatctggtcgccggtgtaagcatggatggtgcacatgataccggatttgataggagccagatcatttaaagctttcgccataggagctaagcagttggttgtacaagaagcagcggagatgatgtggtcatctttgcttaatgtttcatggtttacattgtaaacgatggtaggcaggtcgtttccagccggagcggaaatgataacgtgttttgcgcctgcatcgatatgagcctgtgctttgtctttagaggtgtagaatccggtacattccagaactacgtctacgccgatctcgccccaaggaagctctgctgcgttggctttcgcatagatcttgatctcttttccgtcaacgatgatggaatcttcccctgcggttactttgtcacacagagcgtatctgccctgagttgaatcatattttaataagtgagctaacatttttggagatgttaaatcgttgattgcaacgatctcaaatccttctgccccaaacatctgacggaaagcaagacgtccaatacgtccaaatccattgattgcaacttttactgccatgataaattcctcctatttttaagatggtaattttttcgttcctttactttgttaaagaaacgtcaacctaatgcatattgtacataattccgtacgaaaattcaagaccattttacaaaaaaataaccatagcggcaaatttatggtatactttctctaaaaaaagagatgaacacgtaaaaaaggtgattcacaggaaggagcgaccacatgcgtcaaaacattttatgggattgtcatatgcactcttccttttctggagattcctccgctcccatggagcagatggtccacagcgcagcccaaaaaggtctggccggtgtctgctttactgaacacttggacccggattatcctccgggagaagagaatctggatttttctttggatatccctgcctaccgcaggcggcttatggaactaaaggatctgtgcagggactccctcacggttaacttcggcattgagctgggtcttcagccccacctggcttctgactaccagtcccttgtggagaccacagatttcgattttatcatcgggtcctcccatattgtacacggaagggatccttactatccggagttttatgaaaaccgtcgggaatacgactgctatctggagtattttacctccatcctggaaaatcttcaggtcttttctgattttgacgtatatgggcacctggactatgtggtccggtacggtccctccaaaaaccttcattacagctaccatgcctacaaggacatcctggatgagatcttaaaaaagctcatttcccttggcatcggtcttgaggtgaacaccggggggtacgcttatggcctgggaaaccccaatccttccctggagatcatctcccgctaccgggagatgggcggtgagatcctcaccatcggtgcggacgcccacaagcccgagcgggtgggttactgcttcgaggaagcggcaaagcttctgaaggaatgtggttttcgctattataccgtattcacaaaccgcattccctcttttcatccccttcgttaaaagagctcagaagcctcccatttccacatggtctgcttattcctccctcagggccatgagtccttcatagggacgcagcaccaggcatccatcctgtgtgaacggaacgccgtaattgcagatcaggctttcttttatagaaaatccttccattcgtacagattcttctgagaaattcaccagaatctgtacctttttttctccttccccggcggccctctcaaaggcgatcaccggctgtggactttccacaggagtcatttttccgtacaccagggtttccttccactgctgagactttttcagtctgatgagcttctggtaatagcggaacacggtatgctctccctgtgtttgttccttcacatttctacttttgtattctggattcatttttatccagggctggactttggaaaagcctccgtaggcttccccgctccagggcatgggggtgcggctgttgtcccggcttctgtctgaagcgaatttcagggcctccttgggggtgaatcctgcctggatcgctctgtgatactgatccaccgtatttagatcatcaaattcctccacacagtcaaaaacgcagttggccattcccagttcttccccctggtagagaaagacggttccccgcaggccaaacaggagggtagccaatgctgtggcctggagatctcttagctccttgtcttgtgcacctgctgtcttctctctaaaatatttgttgagagaccgggactgatcatggttttccagataaacggctccccagccttctctttgcacgctttcctgactgtgaaacaacagctttttcaaatctgccatggtccagtctgcctggttgtaccagtttcctccaggggccaggtcaatgtccgcatagctgaaatcaaataccatggagaaatagcccttctccccaataaaagcgcccagctcctcatagggaacacccggtgcctcggccacagtcatcacctggccgtctcggaagcactgctctttcatttcctgcagaaagtatccgatccccggctgattcatgcccagctctcctacattgtgaagaccgtccggcccgtcgggaacggcatccttcatggatgcccccttcttgatataggtgatggcatccagccggaatccgctcacccccttgtccagccaaaaattcaatattttataaatttcctgccgaagcttctcgttctcccagttcagatctggctggccctttgcaaaggtatggtaataccagcctttctttggcaacggttcccacacagagcccccgaagcagctcctggcgttggagggacgttctgggctgtctgaaaaaatataatagtcccggtatgggctgtctggattttttatggcctcctggaaccagggatgctcatcagaggtatgattcaaaaccatatcaatgatcacccggatttccaaacggcgggccttttccaaaagctcctccatgtctttcatggttcccataaggggatgaacgctgtaataatctgccacatcgtagccgttatccttcatgggagaaggatagaagggacagatccagatcagatccacccccagctcctccagatagggaagcttctttataattccccggagatctcccactccgtcctgatcgctgtctgcgaagcttttcgggtagatttcatacccgatcgcttctttccaccaagtctgtttcatcttttatcctctcctgctgtttctacccctttactgctcctgccgcgatcccctcaataatatttttctgaaggaaaatgaacactaccaaaataggcagtacgcagatgagaaccgcggggaatataagctcccagggatttccgtattgtcctgacaggctttttgcgtagtaaaggcttaatgttaatgttttcttgtcattgtttcctatgattaaaaatggtagtaaatagtcattccagatccacatggtgttggtgatgatcaccgtggctgtaataggcttcaccaggggaaatacaattttaaagaacaactgaaagatatttgccccatcgatcactgccgcttcttccaaagacagtggcacgcttttgaaaaagccatgatacaaaaacaccgtcatgctcaagccgaagcccccatacataaggatcagtccgccggtatttttcagccccaggctctccataaagttcaccaagggatacattacagactggaagggtaccagcatggctgctgtgaagcaaaggaacagaaaattgcttccctttgtcttgtttctcaccatcatccacgcggtgagggaggacacgatgacaatgagtgtcactgccaaaaccgtgatcagcagggtgttgaacagggattctcccaatttgatctgctgggccgcatttttcaggaaggaaaaatcccagttttctggcagggatatgggcgatcccacaatctccttctggcttttaaaggaattcacaaataagaaatagatggggaacagcgtatacaaagcgatcaaggccataatcacatagaggatgccttgctttgtttttcttcttacagccatattttctttcattatgcctcaatctcctttctctttgtgatcaccacctgggcaatggataccgccgcgatcaggatgaagaacagcacagcctgagcctgggccataccatagttgggaggcgtattttctcttgtggtaagcaggatctgaagggacagcatccgggttccgaaatcgccgtttgtcaatgccaggttctcatccagcatcttaaagctgctggacagagttaagaaaaatacaatggtaaaggccggcatgagcatgggtacggtgatgtttcggaatttctgccaggcagtggcaccgtcgatggaagctgcctcatacaattcctctggtatattgttcagcccatttaaatagatgagcatgagataaccggcagtctgccaggtggccatgatggccatggcaaaaacagctttatccggatcctggagcatgttcgttaaaaaaggaatgtggatcggtgaatcttccccaaagaggatcagggaaaacacattctgaaaaataaagctccagataaagcccatggccagtccccccagcagattggggaagaaataaatcgtacggaacaggcccttgccttttccgatcttgcgcaccataagggccatgcaaaggctcactatgttcttaatgaccacagccaccaaggtaaatttgatggtgtagagaaaggcggatataaacttttgagagtggaagaccttgatgtagtttttcagtccaacaagggctccgtaccagtgctcagagcctttgaaataagagcctctccaggctgtgaaggagtaggccacgcccataacaaaggggatgaggaccactgcggcaaacagaatcatggccggcagcgtcaataccttgaaccattttttataatatttttccatatgtttttccttcctttaccactcttccataccggatttccagtaatcgatacaatcctgggccacctgctccagctcttcctttgaccaggattccgggttcgtaaacaaatcttccataatatattttccgtagcattccgttccccaggaggacggggctgcgtcaaagggattggccagcaggtcatcttttaccttataagagatcaaatcattggaaagaggattgtccagcaccgtgctttcatctgcattaaaaggcacaaaggcaaatttgttcacaatgtaatccattcctgtatctgaggtgttcagccacagaagaaactcttgggcatcctttttctcctggtctgtggccttggcgttgatgatgtaatactgtgacacaaactcgggaatggaccggttcatcttctccactgtaaggccctctgcctgtatctgggaatcctggaaattcaccttcatgggaagcatggtcaattccttggcagcctggggcgccaccttctccacattggagtaaatccagtttccgtttttaataaatagggcctttccctctccaaatgcctggactgcctggtcatagccagtgactgtggagttgataaactgcgggcctctggccaccggcccctctggtcctgctgcatattggcttaaaaagtccagctcctccagggaatccaccaaaggctcaaagagcttgtccgctttttccggggaggattcccgcacgtcgtacacgctgctgtatacagtgctgatgggatagtttccgaaatggtttccataggtccacttttctgcgccggcaatggcaaaaacaccattgagatgttctgtgttctccgtcttttctgaagcggtctcataggattttccattcaaggtgaaggactgtgtgccgcttcccttaatataagcatccaaagccacgatcatatcctggaattcctggtagtcagcagccaggtaatcttctttgaaggcttccagatcctccacgcccaggacatcctttaaaaccatctggttggcgatgagcccgtatccctccatgttataagggatcccataatttccctggctttcgaactgaagcttcaaggcatccggaacactttcgtaaagggccttcagctccgggttgtcaatgtctgacgcctctgtggcgtagcctgctgatttccattcctcgaatgcgatggcattggaagaaaacagggtgggatattctttggatttcaactcggaacgcatggtctccgaaccctctgtggtgcctacggtaaacaccttcactttctttcctgtctcctcctggtattgggctgccagttcattcagactctctgcgatctcagacttctggttgaaaaagtaaacatcatagtccttgttcacttttccacagcctgccattgtcagcaggactgcccctgcggccaggatacaggcacttttggtgactgctctcattctttttcctccttcttgttgttttcctggaacttatgaaacatgtttcatttccggtatttttttaggccaactgcttggcctttataaatgatagaaaaaagatggctccaaaatagggagcatggtttgttatgtactttgaaacatgtttcatctgttgatttcattatagcacagaatctttccttgtcaatcactattttttgtagtttttcctttgatcagctccacaggaatacggctgacaaaccgttccaatggatttccgtctaaaatattcagcatcacacgaacagattccctgcccagctccttcacattctgcttaatggtggtaaactccaccagattggtcctggacacaaaggtaccgtcgtaggacacaatacacatatcctcagggatcttcttccccagtgccacggctgccttcaaaaaagcgctggcgggcatatctgccgccatgatgccgtcaatttccgggtacttctccaagatcagctctgccagctccagatacccctgataatcaaaggcattccatttaatgcccacctgccttgtggcaatccctttttcctccaggatctgggccagcaccttgtggctttcataagaatacacccggctggaatccgcttcattgcagatatggagcacataatgacagccgctggcgataaattcccctgcggccagcctccctcccttttcatggtcagagaccaccacggggatctgatcattcacgtagaaatccagcattaccagaggttttccaaactgggcatagtcctgaggtttttggttgcacacccccatgatcactccgtccacaatgttggttttcagaatcttgaaataatccttctccctctcgggattatcccctgtgctgcagagcatgaacttatagccgtgctgatacagctcatcttcgatataggttgccagagaggagaaaaagggatgacggatattgggaaccagcatggcgatggtctgggatctctggcggaacattcccctggccagctcattgggcacataattcagttctttcatcgcctgttcaatacgcattttcgtttccggagaaacattggctgtgccattgagcaccctggatacggtacaggccgccacatttgctttttttgccacgtcacggatacttgccattttttcttcactcccagttcaattctcctggctgtccacagtgtaaacagcccttcatttctttttatagtcaaaggagaggcggttcctccgcctcaccttatctctaactttctttcgtctatggatcaccttttcataagcaggttatgccctggctttcctttggatccttctgtccaccatcttctggtagatggtcttcataaattccgtaatggcatcaatgacgatgggtgagaagatcatcagcaggaacaccaggatgatcatgccgaattccagggatcccaaagccagcagcttctgcaggatcacagcgccgccgaaaaatgcaagctgcatgccgtaaataatgatcttcctgtatctgctcaagggtgaatacacggttttcaaagctgccatgtaattccagccggtcaccagcacacaggcagttcccatcatctctgtagagttatacacatgctcacacaccaacatcaccgcaaacacacagcctgtgatggtcacagctgcgggaaaggcattcataaacacatggcgcagaaaggtatggtcaatcttctggtaattgtgctcctgagccagcaaaaaggtaggcgcccccacagcgcagaagctgatcagggacatctgaatgggctcaaagggataggcgcttccgaaaaagatggtgagcagggacagacacacggaaaaaatggtcttgatcaggaacatggacgctgccatacggatgttgttcaccacccgtcttccctggttcacaatgtgtggcatggctccgaaattggagtccagcagcaccacattggcaatattcttggctgcatcgctcccagaagccatggcaatgctgcagtctgcctccttcaaggccagaacatcgttcacgccgtcaccagtcatagctacggtatgcccctgcttctgcaatgcctggaccatctgtttcttctgctggggtgtcacacggccgaagacgctgcactccgcaacggcccggtccatctcctccggcgtctctatggtggttgcatcaatgtatttgtccgcattctttaaccctgcttttctggcaatacttgccacggtcaccggatcgtcgccggagatcaccttgcagtctaccccctggctgtcaaaaaaggccagggtctctggcgcctcctcccggatcacatctgttagaaacagtaaggccagcggggtgaggttttcaggaagacccttggcctccccctcataggtgctgtgggccagcaccaggacccggaatcccttctccccgtaaaccctgcattttctcatgagggcctcatttccctgggggaacaaaaactgggctgcccccatgagataggttccctccccctggaagcaggctccgctgtacttcctgtctgaggagaacggtatggcataatttaacacataatccctggaaaatggaaaatatttccgcagagcttctgcagtggcattgtcatccttgagaacagccatgagatttcccatcacatgctttacacggccttgggtgaccgccaggctctcttctttattcagggcagtggctgcctccttctgggattcccccccaggagtattttggtcaggcagctccgccacagcctcctctgccgtgaccgtagcctcctggagaattgtccgaagacccgggctgccggccgggtccttttcttccccggccgcctgggtacccgccgtcatctccccggcatccagaatctccattccctccacacacatgctgccttcggtgatggttccggttttgtccagacacaaggtatccacccgggccagggtctcaatgcagtaaagctcttggaccatggtctttttcttggccagggtcagggctcccagtgtgagggccacactggtgagcagcaccagcccctccgggatcatccccagaacagctgccaccgtgctcaccacagagtttctcagggtatcccccacaatggtatactgcttatagaaaagcatgatccccagaggcaggataatgataccgataacctttaatatggcattcagcgaatttctcagctctgaattatgccgcttaaactccttggcctcactggtgatcttggatgcatagttatcctttcccacatggatgatcctgcagtaggcctccccggctgtgacaaagcttccggagtacagctcatcgtccacactctttgacaggttgtccgcctctccggtgaggagggactcattcacctccaaggttccgtccagaaccactgcgtctgcgggcacctgatctcctgtcttcaataaaaccagatcacccagaacaagctggtccgtgggcacggtccatttctgtccgtcacggatgaccacggatttgctggcagtaaggatggccagcttgtcaatggtcttcttggctctgatctcctgaaaaataccgatcacggtatttagaaggatgatccccatgaacatggaattcttgtaagaacccacgaacaataccagaaccagcagcaccacgttcaaaaagttaaagaacgtgagtgtattctccagaataatctgcttgtaggttctggtattgggttcctcgttgatatttacctgtccctgtgcaattttttcatttacctgctcatttgtaagtcctgtcattttctcaccacgattattttagattttaggctcgtgcaatgcttccagtatggtaccgcctcctgccacacagtcaccctcataaaagacgactgcctgtccaggggtgaccgccctttgaggctcctgaaaccggcagatgagttcatcttcacccacccgctccagcacagccggtgctcccttatgattatagcgtatttttgcctgaacttccatccctgtttccagagaaggaacactcatactgttcagctcattacatcgcagggcctttgcaaacacatcctggttttctccaatgaccacttcattggaatccggacggatctctgtcacaaacaccggatgacccatggctagattcaggccttttctttgtcctatggtataatgggtgattccctggtgcactcccaggaattcccctgacacacttacataattccccttggggatcttcacatctgtattttcctctataaatctggcataatccttgtcagggataaagcagatctccatactttccggcttgtgagctacgggaatccctgccttttgggcaatgacccgtatttcctccttggggtactcccccaccggcataagcgtgtgcttcagctgttcctgtgtgagtctgtatagggcataggtctggtccttcgcctgggcggcgctcctggccacccctaagcggccgttggaaaatctttggatccgggcataatgtccggtggccaggtactgggcatccagttctgcacatttggcaagcattgcctcccactttatataacgattacaaaccacacaaggattcggcgttctgccggaaagatattcttttataaaataatctatgaccttctcctgaaattgggcggtgagatccatggggatatgggggatccccagatactctgccacctgggcggcatcctccagaatcttttgagaggcttctttctccccctcaggcagattcttctccctgaaattcaccatggtgactcctatgacctcatagccctcttctttcaaaaggtaagcggccactgaggagtctacacctccggatagtccaacgattacttttcctttgttcattaatattcttcctcgtcctcttcttccccttcatgaatgtcggatttgggttttacaaggccgtcaatggtaatgtggtgcttctgggcataatcccagagagcggcatggatcgcctcctctgccagcaaagaacagtgcaccttcacagggggaagtccgtccagggcctccatcactgccttgttggtcacctgcatggcttcctccacggttttaccctttaccatctctgtggccatgctgctggttgccacagcggccccgcagccgaaggttttgaacttacagtccttgataatatgagtttcgtcatctatatcaagaaatatacgcataatgtcaccgcattttgcgtttcctacagttcctacgccgctggcgtgatctatttcacccacattccggggattttgaaaatggtccattactttttcactatacatgattttttcctcctgacaagtactttttttattttttcatttttttcataaaatcttcatataaaggagacatattccgcagattctgaacgatttccttcagacggtccacggtaaaatcaatgtcttccctggttgtctcttctgacaaggtcatacgcagagagccgtgggcgatctcatggggcaggccgatggccagcaacacatgcgaggggtccagagagcctgaggtacaggcagaaccgctggatgcacagatcccataattgtccagcatgagcagcagagattctccttcaataaactggaagctcacattcacattgttgggaagacgctgctccctgtggccgttgagcctgcagtagggtatttcccccaggatgcggtcaatgagataatcccgaagggttctctcctggtttgtacgctccttgatggtttccgccgcccgtttggctgcagctgcataacccacgatccctggcacattctcagtgcctgcccggcgcttgcgctcctgggcgcccccgtggataaaggatttatttttcacacccctgcggatgtacagaaaaccgattcccttgggtccgttaatcttatgggcactggagctgagcatgtcaatgttgcattcatccacatggatgggcacctggcagaaagcctgcacagcgtctgtgtggaaaaggattccatgctctttggcaatgaggccgatctccttgatgggctggatagaaccgatctcgttgttggcaaacatgacggagatcaggatggtctggggcgtgatggccttctccagctcatccagctttacgatcccgttctcatccacgtccagataggtgatcctggctccccgctccttctccaggtactcacaggtgtggaggatggcatggtgctcgatcttggtggtgatgatatggttccctttgtccttataagcctcaaaagcagccttcagggcccagttgtcagcctctgtgccgccggcggtaaaataaatttcattggctttggcccccaggatgccggcgatctgctctctggcattcaagatggcttccttactttttcctgcaaattcatatacgctggaaggattcccatacagctctgaaaaataagggagcatggcttccaaaacctccggcgccgtctttgtggttgctgcattgtctaaatatattaattttcccatttttcttcctcctgattctctcaactctccatatggtctttttgacatccctgcttgctgcggctttcctccacaagctgctccagcatgatagaatccacagcttcattgatcttgtcatttatttccttccacacatggcgggccacacactggtctgctcccctgcagcctttatccgggtcatttcccggacagtccacagcctccagacttccttccagggcacggagcacatctcccacggaaatctcacaggcaggcttagccaggcggtagcctccctgggcacctctggtactggcaaccaggccggccttctttaattttgccatcagctgctccagatagctcacagagatctcctgacgggcggcgatgctctggatggaaactacttctgtgtggcaatgcacagccacatcgaccagggcccgaagaccatatcttcctttggtggaaagcttcatggtatattcacctcttttttaattccgagtgttttactgtgatttctatcttactgtaccaaatatccccagttctgtcaaggtacttttcagcataaaatgcaaaaaacaccttgaggtgctttctatgcgcaaacacggctttctgcggggcactctgatactcaccgcaacgggatttctaagccggatcattgggttcttctatagaatattcctctctcataccattggtgccacgggacttggcatctaccagttgatcttccccatccagggcctgatgctggctttaacctccacagggatccagacctccatctcccggtatgcggcctccaaaagcgcccgccaggacccggacggagcggtccattcttttttcaccggcacaggtctgtcccttgtactgtcctgcctcactgcctggatcctttacagccacgcggatttcttcgggagagaaattttaaaggaggcccagaccattccccttttggggcttctggccctgagcattcccttaagcgcccttcacggctgtatcaacagctattattttgccctgaaaaaagcaggagttccctctgttatccagctgatcgaacagagtatccgggtgctgtcggtgtatctggtatgccaggtccttctgtcccagggacggatgatcacacctaccgtggccattgtgggaatcctggccagtgagcttgccgcctgcctgtgttctgtgatggccatgggatggaacctgaaaaagcagcattttcatataaaaaccttttcccatcctttaaaatacttaaaagaaattctggatatgtcggtgcccctcacagccaaccgtctcctcctcaccctcttaagcagcatggaggtggtcctcattccccaacagctgcggaaatttggattagagccctcccaggccctgagcgtctacggcgtgttcaccggaatggccctgcccctgatcttatttccaaccaccatcaccaattccgtgtccaccatgctcctcccctccattgccgagcttcaggccctggggaaaaatactggcatccgcagggcggtgtccaggatcatcaaatactgcatcctgctgggaactgcatgtggacttttcttcttgtttttcggaaagcctgtgggctacgttctgtttaaaaataaagaggttggggtatatttacagattatggcctttatctgcccttttttatacctgaattccacactttccagcgtgcttaacggcctggggcggccgggaacctgcctcatccacaacgtggccgccatttccctgcgcattttctttgtcctggttatgatccccctccatggcatccagggatatctgtggggcatcctggccggtgaactcaccctgaccctgcttcattccatcgcgttgatacgttataacatcaaaattttgcagtagctaattttttatcgacaaatgccaaaagatatactataataaacctcggattccccaaaaatcactgtggaataccattgaaagatgttaacatacataaaggagattaagaagaagatgggattcgagtttataacgaaactgccaacgcctgaggaaatccgcaaccagtatcccatggccccaagtcttgtggagatcaaagcccagagggaccaggagattcaggacgtattcaccggaaagtctgacaaatttctggtgatcatcggcccctgttccgcagataacgaggatgcagtctgtgactatctgcagcgcctgcaaaaggtccaggagaaaatccaggaaaaagtgctgatcatccccagggtttatacaaataagccccgcaccacaggtgagggctacaagggtatgctccatcagccggatccggagaaaaaaccaagtatgctggcgggcctggtggccatccgcaaaatgcacatgcgggccattgccgagagcggcttcagctgtgctgatgaaatgctctacccagagaactggaggtatctatctgacctgctgtcctatgtggctgtgggcgcccgctctgtggaggaccagcagcaccgtctcactgtcagcggcatggatgtgcctgcaggcatgaaaaaccccaccagcggcgactttggcgtgatgctgaactctgtgtatgcagcccagcacggacaccactttatctaccgctcctgggaggtgaagaccacgggaaatcccctggcccacaccattctccggggagctgtgaacaagcatggggaggccattcccaactatcattatgaggacctggtgcttcttctggagaaatacaatgaacgggatctgcagaaccctgcagtaattgtggacaccaaccattccaattccaacaagcagtacctgcagcagattcggatcgccaaagagatcatgcacagccgtcaggaaaatgcagatctgaagaaactggtaaagggactgatgattgaaagctacctggaaggcggcagccagaagatcggaggggactgtccccacgtctacggaaaatccatcacagacgcctgtctgggctgggatgactccgaacggcttctctatgacattgcacaaatgtgctgattttcttgcagaagtatcatatggaaaaaggggctatcggttaatatcgatttttgccccctgacacgcaagaaagagacaatcccatagtattcgggctttttcaaagcccggaagctctagggaaccgtctctttctttttatgactcttattttagggcgcaaaaaccccttgtttggattttctgaagcgctcctttatctatgctgctttctgttccttttttccttcatatttcttgatctcatcatgtaaaaaccggtggtatttcatgatattacgaccgatcgcatacaacatgaattctttatacactttttttgttgatcggtaatagaatcttcggaagccttcattttctttgatatccccaaagtgcccctctgtctggatcgaccgtgtctgccgtttcaggatcccttcttcactctggatattcgcatgggattcttccttcagttcttcccaacgttcgttgatcttcatgactttattccgctctgcatttttttctgcattgtatttataaagacatttgctcttatgctcacagccgctgcaatccgcgcagccatacacctcgaacgtctgggtataaccatcctgttctttgctctccgtccggatatgccgaagctccctcccgtcatggcagatgtaatagtgctcatcttcaaagactgcaccggtcatgttgtaatacttcccgatatcttctttataagcacgggtcttccgtttttcatgatcctgtagtttgatataacttctgatcccgttctctttcagatacagcaggttcttttcgctgcaatagccactgtcggcagtaactgtttccggcgcttctccaaatgccctccggtgtttttccaaaaccgggatcagcgtattgtagtccgtccggtcattgcttacataaccatggacaataaaataattctctaccgcgatctggacattgtatgccggctttaactggccattgagcatatgatcctctttcatccgcataaacgttgcttccagatcggtcttggaatagctgttacggtctttccccatgatctcaaagcattccttatattccagcagacgactcccgcactgctccagctcctcgtagagcttctggatttccggtttctgttttcccttcccataaatgaatccgatcccttccccttctgctatccgtttcaggtttttcagcagtttcaggatctcaagcggggaacagctgtcgatttctatgatcgtattattggaaatcttcttatgtttggtcagcttccgtttccggttgtcctcaatcacacgccggaccttctccatcccttcgatcacaaacatccgggcatctccaaggtcgtattttggcccatacccattctcacgcagaaacgcattgtaccttgcgtaaagagcatctatggtgtccagcaggcccgcaaggtggtagttgatgctcccacgccagacgaacgtgtatctgtttgcgtttgcttcgatttttgtaccatcgataaagagttctttgagcgtgataagcccttccctttccatgcggcggaggaactgataattcaattcatccaagacttcctctgtgagtttttttcctttaaagtcataaaaagcatctctgtgtggcttctgtcctttggtcagccagataaaggcaaggtctctttgacacagatccacaatacggtcaacagctctgactccgcgcatgttagcgtaggtcacaacagcatacatcataattgggttgaacccggttcttcccttatccgaataacaggcgagcaggcctgaaaaatctaattcctccatcacttttttaagggtatagactggatcgtcatcgggtaaactcaattcgaagaaactgaaattaattttctgttgcccaaaatcaaaaaagtcgttataataatctttggttagcatagttccattataacatggaacgggaagaaagatggctgtcgttagctatcttttttctttttttaggataattttcgggggcaggcgtgattcgtatgaatcacgcctgcccccgtgtaggaccatctatttcccgatagccccttattttttctaaattttttaatgacggggatgagccttcatatacacatcccgcatacgatttacattcatgtttaaatatacctgggtagtggcgatatccgagtggcccagcatttcctggacactcttaacatccgccccgttctgcagcatatgcaccgcaaaagaatgacgcagggtgtggggcgtaatgtcccccttgatgcctgcctcatccgcataatttttcaaaaccttccaaaacccctgacggctcatggccttcccggagcagttggtgaacagctcctccacctggcttccctgaaccatctggttcctggccttatccaggtatctctggagtgcccgcttacatacatttccaatggggatgacccgctccttgccattgtcgctgcagctcacataccccagcaccaggttcacgtctgtcaccttcagatggatcagctcactcacccgcattcccgtagcatacaaaagctccatcatggccttgtcccgcattcctttgggacagtcgttgtccggctgctttaacagcaggtccacttcctccactgtgaggatttccggagctttcttctccaccttggggggcttcatattctctgagggatcctcctggattcttctctccttaaacagatactgaaaaaaagcccgaatggatgccacgcttctggaaattgtggaggatgcaaaattttcttctttcatatgcatcatatagcattccagaacactggctgtcacttcagacacctgggtaacccctctctgtgtgagataggctgccattttcttcaaatctctttcataggagatctccgtattatgtgacgttcccttggtattatgtaaataactgataaactctcgtatcgcactttccatgtgtctctatccctaatccctcgtattataaaaccgatcacccttcagacgatgtaaatgtattatactgttattttttgagaaaatcaaacacttttttcgccgtaaaatgccgcaaaatcaaggtttttcccttaaaccaccacatatcgtcagccgcttccccaagtccaccacatatggtagacgctcttctaaaaaaaattccacctggatagtaaaaattgaaggatcagaggatttatgtaactctcaagaaacatccccagactttgcaggatcaggaaaaaaatggtaaaaattccgtattttctaagatttatcccggaaaatgtgtgtttttgccagctgtacacagaagcggaggaaatgacagatgcagacattatggaaaccggaaggtaaatgacaaaatggggaagcagggtggcaaggcccagaactccgcccaaaagcccaaactgcagcacatacagcgtgagcagggcccctgtagaaaagcccatccacattatggtaaccacactaaaggggattccaaatatggaaaagcctgtgagcagccataagattccataggctccccgtattctccagatctcgttaaaaaattcggctctgccagggacttcccgatccaaggcggagagaagatacacaatggtgcttctcacctggggaagctgcaatttccacaaaatattgggaagcagcacccctgccagaaagcctgccagaaagatccccgaaaaaataagaagccccctgcttccatttctttttttctcatgctccatagacttcacctcttttcaatgtacggaaaaaaggtctgggatagaactccatcctaataaaaagaagccgcagagatctctctccacagcttctatgtgtctatctttcagaactcttggaacggtctttattttgcatagtcaacggctctgctttcacggatcacattgaccttgatctgacctggatattccaactctgcctcgatctgtttggcaatatcacgggccaggagaaccatatccgcatcgttgatatgttccggtacgaccataacacgaatttccctgcctgcctgaatggcaaaagatttgtcgacccctttaaactggttggtaatgtcttccaactgtttcagacggttggtataggtttccaatgtctctcttctggcaccgggacgtgcggcagatatggcatcagccgcctgtacgatacatgcaatgagagattctggctccacgtctccgtggtgggctgcaactgcattgacaacaatggcagactctttgtactttttacagagatccacaccaatctgaatatgagagccttccacctcatggtcaatggattttccaatgtcatgaagaagacccgcacgtttggccagacgcacatctaccccgatctcaccggctaaaaggccggaaagctgggcaacctcaatggagtgcttcaatgcattctgtccatagctggaacggaatttcattctgcccaggagacgaagcaattccggatggattccatgaacacctacatccatggctgcagtctcgccttcctcccggatcatggattccacttctttctgtgctttctccaccatctcttcgattcgggcgggatgaatacgtccatccacgatcaatttctccaaggcgatccgggcgatctccctgcggattggatcaaaacctgacagcaccactgcttccggggtgtcatcaatgatcagatccactcctgtgagagtctccagggtacggatattacggccctcacggccgatgatacgtcccttcatctcatcactgggaagctggacaacagaaatggtagcctcggatacatggtccaccgcacatttctggatggcgttcaccacatattcctttgcccgtttctctgcgtcctccttggctctgccctccaattccttgtagagcttggccacatccaccttcacatcgtcttctactgctctgagcaactcttcctttgcctgttcggaggtcagaccggaaactcgttccagttcttgtactcctttttgttcgagttcatccactcgtttttctttctcttgtaatttggtgattctcgctgcacactcagcttcacgtttctcaactgcatctgctttcttatccacagactcctctttggataaaacgcgcttctcgtacttttgcagctctgctcttctttctttcgtctccttctctaagtcatttctgttctttagagattcttccttgatttctaaaagagcttcccttttcttagtttcagccgatttcaaagcttcatctatgatacttcttgctttttcctcagcagttccaataacttcagcatccttcttcaccttgttatccactgctatcctgcaagaaacaggaaccgcaataagaagcgtaactgccacagcgacaataaccacaataattgtgcttgtcacaggagcacctccttattaagttttcattgtacaaatacaacaatataattttatattgtttcgtgaactatgtcaagattttatctctattctttcttcatttaatacaatttggatatcctcaaaggaaaatccccttctggccagatagccgtaaagccgcctcagttctttatcttccacctttgtgccgggctggtacttcttatttaccaatttacggatcatctccttctcatccgttgtctcaagggatgaaacctcctcccaggcctgctgggcagtctgccggtccacacccttctgccagagctcctgaaggatcttctgtttacttttaatgcccagcctataagaaatatagtgctgggcatatcttgcatcatttatataaccaaaggaggccacataggaaatggcctcctggactgcctcctgggaaaagcctgccaaaagcagcttatccttcagtcccttctctgtacggtccatatgctccagaaggctcatggcctttttggctgcctgctgggcctcaggtgtggtgaaggagctcattcttctgtctcctcatctgcctgcagaactggctcaggggggttgtcttccttgggaaggtctccgtccagaccgtaggccacacgcaccttctcttccacctcctggcagatctccgggtgttcttttaagaacgtcttggcgttctctcttccctggccgatcttatttccgtcgtaggcataccatgctccgcttttgttaataatattgctctctgccgccaggtccagaatatctccctcccgggaaatccctgttccgaacataatgtcaaattccgcctgcttaaagggcggagccaccttgttcttcaccaccttgatgcgggtgcggttgcctaccatctcgccaccctgcttcaaagtttccactcttcgcacatccagacggacagaggaatagaatttcagcgcccgtcctcctgtggtggtctccggattgccgaacatgacgcccaccttctctctgagctggttgatgaagatcaccacacagttggatttgctgataacagctgtaagctttctcagggcctgtgacatgagtcttgcctggagacccacatggctgtcccccatgtccccgtcgatctctgccttgggcaccagggctgccacagagtccacaatcacaatgtctactgctccggagcgcaccatggtctccgtgatctccagcgcctgctcaccgttgtccggctgggaaatgtacagattgtcaatatccacgccgatattcttggcataaacagggtctaaggcatgctccgcatcaatgaagcctgcgatcccccctctcttctgtacctcagcaaccatatgtaaagccacggtagtcttaccgctggattccgggccgtagatctccaccactctgcccttgggcacaccgcccacacccagagcgatgtccaggctgatggagcctgtgggcactgcctccacctgcatgttggcaccagattcccccagcttcatgatggatcctttcccgtattgtttttcaatatgtcccagcgctgcctccagcgcttttttcttttcttcattcatcatcagagttctgctcctttattttaatgcgaacctatgttcgtgttttctaatgtacatagtattataattttcccctcttgtcaaccctgttttccattcccatggatatttttttgcccgtgctgtatatagaaaccgggggcggcgcatctctgctccgcccccgaagtttctctcaatttccaatctggtaaaagatcactgctggccctgggtaagaacggatcttacatgtgccacctcttcctgggcagcctgggctgcgggcacgtaatactgacgtgaccgggcgatctgataaatttcctcctgagacatctcacactggttcctgagctgtttcagggtctgtttcagctggggattctctgtctgggagatcatttccccatagtgtaacagctgtccgttgacgcttgcaagtgtatctgacaccattgtcttatcatttaacatacgcttctgcctcctactgtaaaaactgcattaattgttgtttgcctgtcattgcactctgggctgctttctggaagtactgctttacctccatgtcctgagcctgctccgcataggcctgcattttgcagtggctggtctcaaagcctgtgatcaaatggcgcagattctgcagatctaattctgaaatattcatcatagcatattccctcctgactttattgtcagtagtagtatgcctttttttcttctttttatgtgttttaggattggaattattctccaatcagccagttgtacatttcttcgtactggcttgcggaatgattccaggagaaatcggctgccatggcccggtctacgatcttattccattctcgttttttatcatagtagatccgctctgcattccggatggtattaagcatctcatgtgcattataattccggaagctgaagccggttcctgtactttcgaattcattaaagggctctactgtatctttcagtccgcctgtctctcttacaatgggcaccgttccgtatctcagactcataagctggctcagaccgcagggctcgaaaagagagggcatcaaaaaggcatccgatgccgcataaactctgtgggacataggctcatcataataaatctgggcagaaaccttgccgtggtacttccagtcaaaatgccggaacatattctcatatctctcgtccccggttcccaggatcacaagctgcacagcatcctggcagatctcatccatcacataggcgataagatcaaagcccttctggtctgtaagacgggatacgataccgatcatcatggccttgggatcttcattcagtcccaagtctctctgtaactgtgttttattctttactttctccttgcggaaagtggttgcgttgtaattctttgtaatataagggtctgtctccggattgaacagatcatagtcaatgccgttgacaattcctctcaggctgttggccctggcgcacagaagtccgtccagacgctcgccgtagaaaggtgtcttgatctcttctgcataggtgttgcttacggtggtcaccgcatcggcaaatacaataccgcccttcaggaaattggcatccttgtaggcttccagtttatccggtgcaaaataatagtcggacaggccggtgatggccttgatggtcttcacatcccacacaccctggaatttcagattatgtatggtcataacagtcttgatcccctggaagaatggattggcctggaaggaatcatgaagataaaccggaacaagaccggtctgccagtcatgacagtggataatgtccggcctgaaatcgatcacaggcagaactgacaatacggccttagagaaaaacgcaaatttctccagatcccagggagccgtgtcataaggcttcggtccgctgaaataatattcattgtcaatgaagtagaactgaattccgtcatactccatctgcataatccctacatagcagtttttaaaacccagatccatatagaaatgggtcacatactgcattttatctttccattcctgcttcatacaggcatacttcggcaaaataacccggacatcaaaatattttttatcaaaacatttgggcagtgcacccgcaacgtcggcaagtccccctgtcttaataaatggtactgcctctgatgtggcaaacaaaattctcttcatccgtaaaaccctccttggcatttgcatactggccaccaatgcataaatgctggtaactattcttattatagctcaaatgcggcctattggaaagagcgttttttatattccaggcggattttgtctgcgatcagagcgataaactctgaatttgtgggctttcctttccccgtactcacggtgtagccgaacaattcatcaatggtatccatctttccacggctccatgccacctcaatggcatggcggatggcacgttccacccggcttggcgtggtctgatgctttttagctatggttggatataatattttagttatggaattgagcatctccatatcatttacggacaatatgatggcatccctcaggtactgatagcccttaatgtgggccggcacgccgatttcatggatgatccccgtcacttccgcctccaggttgtgctcgctctgcttcttggtctcttcatgggaggcagccttcaccgtatcccggaatctgcgctccgtgctccgctttaaatgcttgatcctgtttaacagcagtttattgtcaaagggcttgagcatataataatctgcccccagagaaaacgcgtcctccgtgattctttcctgtcccaccgcggtgaccacaatgaaggaaggatgcttcttcatctctgtgtcatgattcacccgttccatcacagacaggccgtccacctttggcatgataatatccaagatcaccacatctggctctttttccttaatgatgctgcaaatttcttccccattatgtgcctttcctacaagctccagatctttatcctctgtgatcatttttcccagtatttctatcattttctcattatcatccgcaatggctacatttaacttttccatgaggtcctgtctcctctcgcttttatttcaattttgtgcagaacaaaccgggccctgttcgttagttcctgcacatgaaacattatagactaattttcgcagtagaatcaagctgaaagtggcgtaaatacgccattttcgttccccacgaatcgacagcacaaggggcgtttctacgacatttttctaccctttattcttgatcatattttcaataaagatcccgtagccgctggccgcatcctggacaaacacatgggtgacagcacctacgatctttccattttggatcacgggacttccgctcatgccctggacaattcctcctgtgagggataatagctcaggatctgtcactttaatgacaaagcttttgttggtgtcctcatgattcatgtcgattcttgtaatttcagcctcatactcctttacctcatcctccaccttgcacaaaatagaagcttttccaatctccatatcctgcttgtaacccacaggcatctgccggaaagaaaggccggatttctcagcattttggaaaatcccatagatgccgttttctgtattttttgtgatcttcccaatacagttggccggctcatagcggatcaatcctgacagttccccgggatttcccttggatcccttgtggatccccagaatctgtgcctcatacaaggaaccctgtctgatctccagcagacttcctgtatccacatcgctgatgccgtggcccagggcgccgtagctgcctttctcatccacgtaggtgagggtgccgatcccctgggtattgtcccgcacccagatgcccagcttatagtctccgccctggtcctttaccggctgcacagacaaggtgagcgtttgtccatcccggtccaccaccagcctggccgtctcgccatcacactgggcaatgtcttccaccagctctttcttggtggtgatcttctgttcattaaaagctacaatatagtcccctggccggacaatgtttttggcaggatcctgggagatcccttcaggagaaaggatggctcctgtgtcaatgatcagcacaccctttgtctccatataaatccccaccggctctccgctcaccaaaagctcctgctctctggatgggatcacctttacatccttaaaggggatcactcccaaaagtctgcaagagatccggtagctttcctcattggaggcagtgatggagtcctcccaggtgaccagcggatgattgagcaccttttctgccttttcctcctctccctggaccacatacagctcgtcaggaatttttctgtccatataacggtagcccagaaacccaatggctgccatatctgccaccagtgccagaagcacaaataatcggtatcgtttttttctgctcatacaaagcaagcctcctcatgtgcatgaattgggacaacctcagctctcgtgaaatcctattaaaaagaaatcatgaaaaaaagagaggatcgcctctcggttatcctctcttagtatgttgggaatggttttatttcaatcttgtatttttatgttcctgtgccaattgtttcatctcacgggcgttttcttccaccgctttggttatttccgctccgcttaagagtcttgccaattcatggatggatgctttgtggtccaaaggataaatgcgggttgtagtctccatgccctccaccgattttttgatctcgaaatgggtgtcagccatggctgcgatctggggcagatgagtgatgcacagcacctgatgatgtgcgccgatcaccgccattttttcggaaaccttctgggccgtgcggccgctgatcccggtgtcgatctcatcaaagagaagggtctcgatttcatccttgtcagccaggatcgccttgatggcaagcatgatcctggacagctcacctccggatactaccttatttaaaggacgaagatcctctcccggattggtggagatcagatactgcacatggtcaaacccgctctcggaatactgtttttttctggaaaattctatggaaaaacgtacatccaggaagttcagatcctgaagtccggcaatgattttcttttccaatgctttactatattctttcctggccagtgacaaatcatgcgattttttttctaattttttttccgctttgtccttttcagcctttaatagagcaagattttcctggaattttacaagattttccaatttttcctgctgctttttctggtaggcctgtacgtccgcaaggctgcgtccgtattttgccttcaggttgttcagcaggtccagacgatgctccacttggtaaaagctctcctcgtcaaagaccagatcatccagataggaggacacttctctgttaaaatctcccagcagactgtcaatatctccaagggcagactccatgcctaagagggactccctgtcatactctgtcactttggagagctcccgcagggcctgtcccaccatctctcccgctccctgagggctgtcatagcccacacagtccttcacggttcccagagcctgggcgatgcgtttgctgtgactcagcttctggtactgccgctccagctcttcatcctccccgggctttaaagccgcctcttcaatttcccggatctcaaaatccaaaaaggccatctctctttttctctgctcctcatccatgtccatttccttcaggcgctggacacagctttggtattgagaataggtctttttcacctggtccagaaggccggctgtcttctcttttccgtaggcatccaagatctcaagctgcttgtcattgtataacagggactggtgttcatgctggccgtgtatgtccagcagatgggcggcggctgccttcatctggctcatggtgcaggtttccccgttgatcttacagatgctgcgggtgccggttagcttgcggctaaggaccacctggccctcctctggctgaatatccaactgtgtgagagcctttagggccctttgattttccacctgaaatacaagctccaccagggcggcccgggtattgtcccggatcatttccctggacattttgcccccaaggacaagctgcatggagccaagaaggatggattttcccgctccggtctcaccggtgaggatgttgagtccggggccaaattccacttcgatctcttcaattaacgcaagatttttcacatgaagctgaactaacatatataactacctacctgttcttctccaggattttcctgagccgttccatgaccagaagggcctggtctgcggatttaatggcgcacataatggtgtcgtcgcctgcgatgcagcctacaacttccttccatttcatggcatccagggcagctcccaccccctgggccataccggcaaccgtcttgatcaccagcatattttgggccagatccatgctcaccagggcatcctggacaatgcgtatgtacttctcgttgagaccttcctgggcgggatggagcacctcataacgggaatggccgtctctgccagccaccttggtgagcttcagctcccggatatccctggataccgttgcctgggtcacagaaaaaccggcttcgttcagccgtgctgccagctcttcctgggtatctatttcatattcatggatcaactcaataatttttgcatggcgttccagtttcacctgcttctcctcctaactgtctctcattttctgcctgaggacttccacgaagcttaaattattaagcttcacaaccttggtgctcaccccggccttctctatgacgatcctgtccccggtgaccatggggatctgggtatctccgtcaaaacaggcaagcccgtgctccatctgttcccttctgccctccccgatctccactgtgatcacatccgtatcaggaaaaataatgcttctggtattcagggtatgaggcgccagaggcgtcattatggtcatggacgcactgggggacacaatggggcctcccgctgagaggctgtagcccgtggaacctgtgggtgtggctataataataccatctgcattgtaagaattcaaatactcttgattgacataatttttaaagcggactacccgcagaggtccttgtctgctgatgacaatgtcattgagggcaatgtcctccccctgaagctgggtgccgtgatacacccttcccttaagcatcatccgctcctcgatctcatagtctcccataagaagcttgtccagggccgggtataaggactgacggtccacctccgccagaaatcccagggtgcccagattgatcccaaataaagggattcccttgttcaccacatccctggctgcctccagaagggttccgtcccctcccaggaccatgatgcactgggtatcatcagggattttttccgggtctgtatagtgataggttccgtaatttttcttttccgtcaggtggatccggcaggttttcccgtgcttctccagataggccgtgatctgttgtgtgacggtcagccggggatccttcatactgttggtgattatataaaatttatccataccgccgccctacttgtccagttccccgtgggcagcttccaccacctgctggggagtgcgctccagaagctcctgtatgagagttccttccggacattttcttaggtgcagcaaatactcgatatttccctccggccccttaatgggagagtactccagatgcaggctctcaagggcaatggagtgggcataggcaatgactttttctataacctcctggtgcacggccccatccctgaccactcctttttttcccaccttctcccgccctgcctcgaactgaggtttgatgagacacacgatctctcctgctggcccaagcagctcccggacaggaagcagtactttggtaagagagataaaggacacgtcaatggaggcaaaatccgcaggctcctggatatcctttggaagtacatagcggatgttggtcttctccatgcacaccaccctgggatcatttctcagcttccagtccagctggccgtagcccacgtcaatggaatagaccttcactgccccgttctggagcatgcagtctgtgaagcctcccgtggaggcccccacatccatgcacaccttgtcctttaaggtcaggccgaaatgggtcatggccttctccagcttcagaccgccccggctcacatagggcagggtgttcccccgcacctccacctgcacagtatcctggaacatggtcccggccttctcctccttctgcccgtccacatacacctggcctgccatgatgtaggccttggccttctccctggagggcgccaggtttctttgtaccaatagtaaatccaaacgttctttcatgtcattcctcaaatttctccagaacgcaggccagcacagactctgcgtccagcttcagttttttctttaaatcctccactttcccgtggggaacaaattcatccggtatggcccttaacaaaaccctgcagtctgcccctgtcttttgtacccagttgcctacctgctggccgaagccgcctttttccgcattttcctccagggtgacaaacagccggtggtccttggccagttcacccagcagctccacatccaggggctttacaaagcgcacattcaccagggttgcaccgatgcccgcctttttcaggccctcatagacctccagggcagtcttcaccatgcttcccacagccagaagggcaatgtcctttcccctgtagagaatctcgctctttcccagggatatgggctcccggaattcctccaggccgtcataggcttctcctctgggatagcgcaccgccaccggagcatccatgtgaacggcaaatttcatcatatcagaaagctcccatttattcttcggagccataatcgtcatatttggcatcatggacagataagacagatcaaagcagccctggtgcgtctcaccgtctgctcccacaagacctgcccggtccacggcaaacaccacatgcagcttctgcatgcacacatcatgaaggatctggtccacggccctctgtaaaaaagaggaatacacagccaccacaggcaccaatcctcccaaagccagtcctgcggcaaaggtcaccgcatgctcctccgcgatccccacatcgaaaaaccgctccgggaacatgttggagaagcgtttcagcccggttccggtgggcatggcagcggtcacagccaccacatccttctcccggtctcccattttacgcatgaccgtggaaaaaatatctgtccaggaggctttccctcccttttcagcgggaagtccggtctcaatgtcaaaaggaccggttccgtgaaatctggcaggatggcgcatggccgggagatacccccgtcccttctctgtgagcacgtgcacgatcacggcgccctccaccttcttggcctcattgaacagcttcatcatttggcgcatgttgtgcccatccacaggacctaaatacgtgagccccatgttctcaaatagcattccgggaataaaaagctgcttgatgccggattttgtctttctcacagtgtccacaatagcgctgcccaccttgggaatcttattgagtgtcttggtgacccccagcttcatccctgtgtaggcctcggctgtacggatgccgcttaaatagctggacatgcctcccacattccgggagatggacatattgttgtcgttgagtactataataaaattggttttcagctctgctgcgttgttcagggcctcataggccattcctcctgtgagggccccgtcccctatgacagataccacctgatacttctctttctttaaatctctggccataacatagcccagtcccgcagaaacggaagtggagctgtgtcctgtgtcgaaggagtcacaggggctctcctgccttttggggaagccgcttaagccgtcctcccggcgaagctgggcaaagccctcttttcttccggttaaaattttatgcgtataagcctgatgtcccacgtcccagatcagcttgtccatgggaaaatccagcacattgtgcagggcgatggtcaattccaccgtacccagattggaagccagatgtcccccggtcttgctgacactttcaatcagaaaatttctgatctcctctgccagaaggggaaaatccgccagcggcaggttatgaatatcattgggttgattgattttatcaaggatcattggtatctcttcctttattttttacggtaaattaactcctgtatcagctggtacagaaattcatttttttcatccagtccttccagaaggctcagggcacgataggacagcttctgtgcctgatccttggcggcttcaaggcccacaagagtcacataggtagtcttgtggttcttctcatcgctgcccacaggtttgcccaaaacttctgtggaactggtctggtccaggatatcgtcctgaatctggaaggcaatgcccaccagatcagccgcctcctctataatctgtacctgctcccgggaagctccggccaaaatggctccggccatcatggaagcctctatgagggcagatgttttattcttataaatatattccagcatgggaagggtcagtggctttccgtcattttccacatccacgccctgtcctcccagcatcccatgaatgcctgtcttatgggcgatcacctggcaggccccggcgatggcttcactcctggagggatccagggaaaaggcccccagcatcacctcataggcatagtttagaagtgcatccccgcttaaaattcccatagcctccccgaacaccacatgggtggtcttcttccccctgcggtattcatcattgtccaaggcaggcaggtcatcatggatcaaggaatgggtgtggatcatctctatggctgccataaaaggctccaccaccgcacctgttcccccaaacatggcgtaggtctccctcattaaaataggacggaggcgtttgccccctgccgtcatactgtaattgaccgcctctgccatggtcttggaaaagccctcctcctttggcagatactctaacagcagctcctggactgcctgtgtttttctctctaattcctctttaaaattcacggaaactaccatcctcattcatctggagcattttcttctccactgtgtcgattttgccattgcaatatttcaaaagctccatcccctcctggtaaagcttaaaagactcctccagagaggtatctgcgtcctccagcttttccaccatggtgtcaagaatctgaaacacctcttccaccggacgggattccggctctttcttctcttccatctgcatttcctcctctgtctgcctggctcacctgctgcacctgggccgtcaccgttccatccgtcacctggatccatacagcatccccaggttttatctgttcaatgctggtcactgcctttccctgggcatcctccacataggaaaagccctgtctgagctttttcaaaggagagagtccctccagacgctctgcatacaggctcatcaggtaacgcttctggcggatttgttcctccatggcccgccccagccgctccgtcacttggtccagatacacacgtttttcccggatctgattttccgggcttaaataagacagcttggtgcggtaatgatccagacggcttcggtacagagacagccgtgcctttaccgaccggtccatccgccgcttatagtctgatagctgctccagaaggcttctgagatcgtacaccgccagctccgctgccgcggacggggtaggcgcccgaaggtccgccacaaaatccacaatggtgtagtctgtctcatgacccactgcagagatcacaggggtacggcactcaaaaacagccctggccacagcctcttcattaaaggcccacagatcttctatagagcctccgcctctgcctacaatgatcacatccacaccagcttcatccagcatggagattccccggacaatgctctccttggctccctccccctgtaccagggcagggtagagaaggatctgtacgtagggattgcgccggcccgctatgttccggatatcctggatggccgctccggtgggcgctgtcaccacccccagccgcttaataaacttcgggatgggctgcttatattcctgggcaaacatgcccatctcctccagctctgccttcaaagccagataccgctcatagagagctccggccccttccagggtgatctccttggcgtagagctggtaccttccgtcccgctcatacacatccacggctccccctgccaccaccttgtccccgtccttcattcgaaaggaaagtccccggcggtaccctgcaaacatgacacagctcaaggtgcctgtctcatccttcagggaaaaataaatatgtccggaggtgtggtatttgcagttggacacttccccctttacatacaccttctgcagaagaaagtcctgggtaaacatgttttttacataccggttcacctggcccactgaataaatactcttcatattctatgcctgtgcgatttttcctaaaattccatttacaaaggagaaggaatcctctcctccaaagcgctttgccagctctaccgcctcattgatggctacgccggtgggcacttcttcatcatatttcagctcatacactgccaggcgcagagctgtcagatccactctggccatacggcttgtcttccagcccttgctggtctcattgagcagggcatcgatctggggaagctttgccatcaccttctcatatttctctttcatgtaattctcttcttcctgggtgagctcctccagggattcaaaatacatggagatctgctgtggcatctcttcctgtgaattaaactgcttgataaaaaggagcttaaaaatatgctcccgcatttctcgtcttcccatatattcctcccgtatatagaaaaaaggaaagggttactttcctttttctttctccatatctacgccggcgatgtggatgttcacatcggcaacttccaggcctgtcatattctctatggaagatttcactctctcctggaccttcttgctggtctccagaatgttcttcccataatcaatattcaaagccagctccacggtcaccactctgtccgttaccgtgaccttcacacccttggacagatttttcatgcccagcttccccaccagctcgtaggtgatgtttcctgccatagaggccacaccttctacttccgtggctgccagaccggcaatgatcgctactacctcgtcagcgatctgtacttcaccgatatcgctgatctcctgtattttatatgtgtttctgttctctgccatagcaaaccctcctaaggatcttcctcactgaaactattctttgtacattatatcaaaaacatgcataaaataaaagggttatttactgaattccgacaggacaagtcctgggttgcgctccagggtcatgcccacgctccaggaatttacaaagagaagcaggggatttcccttcaggtctgtcacttttttcatgtctgaggtaccggtcaggtcagccacattcacctcatccttgttctcgatccagcggatatattcatagggcagattctccagaatgatctctacattgtattcgttgttcagcctgtatttcagcacatcaaactgcagcacgcccacaacacccacaatgatctcctccattccagtatggaattcctggaaaatctgaatggctccttcctgggcgatctgattgatgccttttacaaactgttttcttttcatggtatctacctggcgcactctggcaaaatgctctggtgcaaaggtggggattccctcaaaagcaaatttttccccaggggaacagatggtatctccgatggaaaagattcctgggtcaaagacgccgataatatcccccgcataggcctcctccaccacatggcgggattcggccatcatctgctgtggctgaagaaggcgcattttcttctctccctggacatggtaaacctcttctcctgcatcaaatttgccggagcagatcctcataaaggcaatcctgtcccggtgggctttattcatattcgcctggattttaaatacaaaggcggaaaattcatcgcccataggctcaatcaagccagcgtcggacattctgggcagaggggaggtggtcatggacaaaaagtgctgcagaaaggtctccactccaaagttggtaagagcggacccgaagaatacaggagtcagctctcccttatccaccagctcctggtcaaaatctgccgaagcgccgtccaaaagctcgatttcctccagaagctgctccttctgctccgggtccatcacctggccgatccggtcctcatccagtccgatctcttcaatcatcccctcttttgtacctttctgggtatcggagaaggtgagcaccttcttggtattgcggtcatagactccccggaatttctttccggagccgatgggccagtttatgggacaggtggcaatgcccagctccttctcgatctcatccagaaggtcataggtatcattggcatctctgtccattttgttaataaaggtaaaaatagggatatggcgcatgacacagaccttaaacagctttctggtctgggcctccacgcccttgcttccgtcaatgaccatcaccgccgagtccgctgccatcaatgtacggtaggtatcctccgagaaatcctggtgtcccggggtgtccaatatgttgatgcagtatccgtcataatggaactgcagcacggaagaggttacggaaatacctctctccttttcaatctccatccagtctgagactgcatggcgggcagtggcttttccctttacagagcctgccaggttgatagcccctccatagagaagaaatttctctgtgagagtggtctttcctgcgtcaggatgggaaattatggcaaaggtccttctctgttctatttctttcgtatacttcgacacgattctaatgcctcctatactgttcttccagttcttagcaacgtttctattctattatagagaggcttttcatgtcaagggatatcctgggcaatgccaaagtttgttctttaaaagctattgtcctgggtataatcatagtctgccaccgtgtcctctgtccaagtctgggtatcctgggtcccctgggtatcttcagaccaggtctgggtatcctcggtcccttcggtaccgtcagaccaggtctcggccccgtccacatcctcgccttcataggcgtctgtctgggcggaggtatcctgggaatcttcgtcctgctcctgggtatcggattcatcgctggcctggctgagaggagtgatcacaatgttctctgcagacaccccagtctttctcttaacaatatcctcgatctgagcccgcttggcgtcctccagcgcagcatccggcactacaatatctgcggtctccccggtaaggttcacaatgacattttcaaagcccttggcctccagcaaaagctccgctgcggcttccttctctgtcatctctgtcatgctcaccatggtgttcacagcttcctgcttctgttcctgggacagctcctggttgtcaatgatggcctgaagatctgccttgttctgagaacggatctgctctctgctcagcttcgcctgggcagcaaagttggtggctcctgtgaggatggcttccccgggagtgtctgtatcctccagcagggcagaggtctcttccatggaacccgtgctgttctcctccatgagggcgatctggtctgacaggtcatagtcaatgctgtccacctcatccagaatactgctgctgtccgtactggcctccttatcctgggatgtgagattgacatccgcaaaattcagatatcctgccacagcgatcaggactgccaggccggtgataatcacctgattctttttcatgatctttttcacttgcactctccttatttcattttcattactttaattttatgggcttctacctgaaataatgccattactgcctgctgaatattgcggactaccaccggactgtctgctccctgggcggccaccagtactcccgtcaccgttcctgcctgactactgccggaaaatacatcttttttttcctccagagtgagcattacctgtacctttcccacgccctccacattggagaggagattctccagacttttttccagtttctctttctctgtgagagattcccagtcctgctgtgcatctccctgcgtgccggctgacttcttattctccaccggaagagcgatcaccaccagcagcacgcccgccagaaggatcaccagccactgtttccctgtcatattcctgaaataagacagtaagcttctcttccccgactccatagactctttccaactcatcccggatcatcctctccttctcttcactgggacttcccgccgccgtgatcaccacggagatgatctttggctcaccgcctggttccagttgaaccttggcccacaccgcttcccccagggccccctccagcaaacgttggatctcctcctgtgcctgctgctcatatcccagctgaaggtaggtctcctggacattttccagggcccaccaggcctggtccacattctgctccagcacgtgggactggaagctttcctttagctcctcccctcttccaaacaggttaaaaagaggcgtacacagcatggatatgagaatgatccccataaaataccgcaggtatctcacatactttccgtcaggcataaaattcaggacggtgttgagaagaatatagtagactgccagatttttcatccattcataaatactttccctcacggtctatcccccaaagctcactgccagaatggcaatggtgatcagacacagcaccagtgccgtcagaaaaatacgaagcagcagcccggttccttcccccagtgtgctcaaagcgcctatgagacgtttatcggacaccggttcccccagagctgctgccagcttatacataaacgataagattccataatggagcacaggctgcaatccccacattaccagaatcaccagaaatgccacacccatgcagttccgaactaaaaccgcgcttgtaataacgatttccgtcactgcattcaccgcgttgcccacccccgggatcgcccctgccgtctttccgatggcgctgcgcttcagtgagtcgatcactggcgccaccaggtttttaatgatctgcatacctgtcaccaggcccagcatggtcttcagcccccagttgatcactgtctccataagatccgccagcttgctaagcatgtcctcccgggacaggtggttcaccagccgcaggagtacatacagattggccgccggaaggagaaactgaagcagcacccactggatcagccatacgagaagaaggaccatctcatagaacatagctgccgaggaggctcctcctgcagctgccacagccagaaaataagcgggcgaaagtcctttcataaattctgtcatcagctccaggttggccttcagagaatcgctcaggccagagaaggactgcaccagaaggagaaatagaagaagatagaccacataaaagctcacctcagccatctggctgctctcaaaaacctgggacagattgtagaaaatagctgcagccagcacaagcagaaggatctgaagaaacaatccccgctccgcctccagccgggagaaaaacacccctctcaccagatccagaagggcctcctttgagaacatgtcctctcctttgagaagcctttttaaggctgcctgaaagtcaaagctctcctgccccagcaggccgtcgatgctgtcctgcaccgtctccaggtccatatcccccaggatttcctgggtccatttgttctgtcctgtaccttcctggtcctcttgtgcctgtcgggctgctgcctgtccttgctgatcatggcccttctcactactgcctggttcctgcgctccagggctgtcctggttttcctcactgcccgcactttgggcggccttcacctggcggctgcctcccatagccagaacaagcccgaaaaggagtacagccagggccagccaaagagccttcttccccccgctcatgacagaaattcctgaatggtttccagaagggccaatagcaccggcatactcagcaccataatggccagccgggagaaaagctcaatctggttccccacagcacagtaacctgcatccttgcagattcccgccgcaaattgtccgatataagtgattccgatcatcttcagcagggtggtgagaaaggaagaatccatgggcaggtagctgcggatcttctctatagattcaaataaatactgcattttccccacggccagacccaggatgcacagtcctacggccactgtgacgaagacaccgtattccggctttgtctccttcaaaagaaagcccagcataacaccacagatccccagaagggaaattttcataatgtccatttgactcctccttttgaaccccttttttcgtccagcggccccgtttttccctgggtatgtacctgtcactgtgtggattcccccggtgaattccccctataaagtaaacagggtttgtatgctctgaaacagctcgtagatatagggtacgatccagaacaataccaccagaaggcccgccaggcttaccaaaaaagcctgttcctctcttccgctgtgctttagaacctgggagaggatggagaccagaatccccactgcggcaattttaaaaatgatgctgacctccacggatatcccctttcttagtctgtattcaaccccctttaacacagaaaaactgcaagaaacagtcctcccagcagtcccagggtctgatagatttttttcttttgaggaagctcctttcgcacctccccaagggtggtgcgtagctcctcttcatataattccaggtgatgaacctgggtggtctggtccaaatagcccaaatttctccccagatccagaagggcatttctgtcagaggcagtgagggcgcaccggctcaaataggtatccgtaccccttttccagatctgggccacactctctccccggccggtctccagctctctggaaagggctgccaaaaactccccaaagggggcatccagctttctggaaatctggcggcaggcatctggaagggaggttcccccataggagatctctccctttaaaagaatcaccaaacgaaggagaatgccaaggctctgctcccggcgggtgagattcctgccagccgcagcccccatacaggcagctcccacaacgatcagggccagccctgcggcctttagatacatgctcttccctcccggtccagcaccgccttcaccactccggccctgcctctgtggcacagaaaaatataccgttcaaacacctgctgctccataagcctgtgaagagccggattctgccgcagatcctccagggagcttccatggaccgttgcgatcagcctgcatccacagttcatcacagcctccacggcatcataatctgcctcccggcccagctcatccaccgccaccacctttggagacatggaccggatgagcatcatcatcccctctgcttttggacagccgtccaggatatccgtgcgcattcccagatcattctggggtaccccctggtaacagccggccagctctgaccgctcatccaccacccccacggtacacccaggcagctccccccagccgttggaaatctgccggacaatatcccgaagcagcgtggtcttgccgcaccggggcggggagatgatcagcgtgtggcagatgtgttccttctcctgtatgaggggcagcactttggcggcgcatccctttacctgatgggacagacgcacattgatacaagagatatatttcattccccgcacccggtttccgtccaggatcacctttcctgtcactcccacccggtgtcctccctggacagagagaaacccctggcgcagctcctcctcataagcatatagcgaatagccgcttaaatattccagtgtttcctgtaaatcctcctttgtgaccaaatagggcagtccattttccgtccgccccttctgccataaaaatcgttctcccccatcggaaaccaagaataaaggccgtcccacccggagacggatctcataaagcttgtcatagtcaggcctggcctcctccagaagctgccggatattcttggcaaacaggcaggtaatctggtttgcttccatgtggatcacctctctggatataatatatgtggacaagatctggattagtacctcaccgcaggttttttcttgcaagggaacgttcttcaagctttcccttgcaagaaaaaaagaacagagccaataaacgtctgttcttcaaatctatttgtaataccccggactgagattgtctatgtcctccatcacctttattaaattcagcttcagcacccggtccacaatattagccgaggaggcccggtaggcataggcggctgattcaaacagcacgtaaagctggtccccgtccacacagatctgttccatacgctccggcatccggtactggatcattacctgattttctggataataaatctcttcccgtttcctgtacagagacagatccgagggcatgatcccataggactgggaggtgatgagataatcctcataaaaggcaattccctggacacaggggggaatacttcctgtctccaccggcatagccatgtcaaagtccatacccagggtgctgttgttttccgtgatcagccgtccctcctcatccacctggtatttcaccaaggttccatctgagaatctggaaaaataccccacatacagacagccgtcatggaaggtaagaaaagaatcccggataatcccgtagagataggtggtctccactggtatggggagatggtctctggcaaaattatagtcttttagatcctgaatggtaaaggtgacggcctgggcgataccctggtcatgggaggagtaccagatcctctggtgctcccagtcgtaggccaggcctcctgcatggggttttcccggcagcaccagctctttgataaaccggtggctttccttattgagcacatagatcactgaattgtgctttcctgttttgcagtaggcactgatgagcacataatcctctgtgacagccaatccctggggagtcatggagctgcacacatccgactggcttccttctgccgccagaagggttctggtaaatttcagtccgggaacaatataagttccatattccctctccttctgccttccctcaaaggcaagacgattcagatcctccttctgggacagcatctgaagctggccgtagagagaaaaactggccgctccctggtttgtagcattgtaccgtaccgggggctccacctttgcccggtagataaaggcatatcccacatagctgatgagtatgacacaagccagcacaaacagcttgaacaggatcgcccacatttcttttctattctgtttatccatgatgtcttatcagcctcgtatgctttctctgttagtccagggtgatatcctcatatacccattccagctccatggggaaggcactgtacaccgccgcgctgtactggggtgccacgtccagaagctcataccagccctcatgaagagggatggtgctcagctctctggaaagcccctcccccgtccatttaatgtaggcctcccgcagcacccactgggtgaaaaaggcttccaccggccggtcggcgttcaggatctcggcctgcatatccaccgggaccatccggcccagcatacgctcatagttggcttttttatgtatctgtatatcaatcccaacctcctgtggagccaggatacacagcacatattcccccgagtggctgatattataatgaatatgaggctccagggtaaaaaacggttttccgtgctcccctctggaacggggctcttcggataaattcatgccgtacagcctcatgagggctttgcgcagcagctcctccccgatcatgtgttcaaggttcttcccctcatattccctgctgatctttgtataaaaaattgtccccttcttcataactccgcctcctctataaaacgggaaatctctttctctttctcaaactcacggtttacataacacaaagtcaattccttcctggccctggtcatccccacataaaacagcctgcgctcctcctccagagcagtgtccagaaccgcctttttgtagggaatatttccttcattgacatttaaaatatagaccctgtcatactccagtcccttcacgctgtgaagagtggacagggccactcctgcctgtctgcactcctgttttctggcctgctcctgcagcttctgggtgtaatcccggatggcttcctcccactgggcaaagtcctttagccccctggctgtctcctgcagccggtccagcacctcaaaaagctcctctggcttaagcttcctgtaaatggcgtattcccggagatagtcctcatatcccatacccttcctgataaaatttacggcggcaaagggattcagggaccggagaatccgaagatgggtctccagggtatcaatgcggtcacacatccagtccttatccttataaaattcccgaagctggtcaaaggacacctgtttttcctttacagcctcccgggataaataccggttgggacggttcatcacctccagaaagtattttctgctcctgtctccctgggccatccgcagatatgccagaatatttctggatatccagtgttcaaacaaattaggcagccgctccttcatataaaaggggatctggtattccataaagacagacaccagcccctccgcttccagattggtacgcaccagaactgccgtgtcctccaggcagccaccctccctggcataggcctgaagctgggtcagaacatattgattctcctcccgcaggttctccagacatttcactgacacagccgcccccgcaggattgggggtgaccagatctttggaaaaacgattcctattgtgggcaatgagtcttcctgccgctgccagaatatttttgctgcacctgtaatttacatttaggaggatctgctttgcctggggaaaatccttgtggaaattcagcatgatctctggtctggctccccggaaatgatagatggactggtcgtcatcccccacgataaaaaggttattttccggctgggccagaagacgcagggtatcatactggatctggttgatatcctgaaattcatccaccagaatatactgaaatttctcctgccaggcctttaatatatccctgcgctccataaaaagctcataacagcacaccagcatgtcatcaaaatccagaagcctgctctccctacattttttcacatatccctcataaatattcctgaacacctcatctggacagcttgtggaataataatacgaaagatttatccggtttcccttcaccagactgatctccctggaaatctcctccagggcctccccttctctgctcatctcttctccataatcctggataagttcccgcaaaaagccagatttttgctcctctgagagaatattggccccggtgagatgataggcatgctttaaaatcccataataaatcccgtgaaaggtgccaaaggtcacctggctgcctcccttttgagtacgctttaaaaaacgttctttcatttccctggcagaggccctggaaaaggtcaccaccaaaatggaggagggagaaacccctgcctctttgatcaaatgctctgtacgctccacgatcacagaggttttccctgaccccggcgctgcaatgacgcaacagggacccttcacatggctgatggcctgctgctggcctgtgttaaactccaaactctgcgctccttcactgttctttttttgtgaaaagaggaatttctccggcttccgccaaaaaaatccctcttccggttctttgtgccctgccgtccttttcaggaccaacagcaggtattcttcttctatttttatttgctcagcttctcaatggctgcctggactcttttcaaagtttcctctttgccgatgatctccatgatctctgtggctcctgcaggggtcatctgcttgccagacacagcagtgcgaaggggccacatcacatagccgtttttataacccttctccttcacaaaagcgctgagagcctcaaagagaggatcattggtgtaatcctcctgggcctgaagcaccggcagcacctcctgaagaactgccagggaggattcctgggtggttttcatcttcttgtggcagtacatggaggcatcatattccggcacctcctggaagaaatcaatgagctgcacaatatctggaaatacctcgatcctggtctggaccatggcagcgatcttctcaaaattaaaatcctttttcagtacctgttttagataaggaagagccttctcatagaaagcctgtggctccatgcccttaatatactccccgttcatccaccgcagcttggtcatgtcaaagactgccggtgacttattgatgtgatgataatcaaaggcctccaccagttcctctaaagtaaagatctccctgttttctgcaggactccaccccaaaagcgccacaaaattcacaatggcctcagtgagaaaaccttggtccaccaggtcctcgtaggaggaatggccggagcgcttggaaagcttctggtgctcctcattggtgatcagcggacagtgcacataggtagggatctcccatccaaaggcttcgtagatccggttatatttaggcgctgaggacagatactcatttccccttaccacatgggtgattcccatcaaatggtcatcgatcacattggcaaaattataggtggggtaaccgtctgtcttgatcaggatcaggtcctccagctcctcattgttcaccgtgatatctccatagatcacgtcctggaaggtagtggttccctctgtaggcatattaaaacggatcacatagggctctcctgcgtccagctttgcctggacctcttccttagacagcttcagacagcgcttgtcatagatggaaatttcctttcctgccaccacacgcttcatgccctctaaggtttccttgtcacagaagcaatagtaggcatccccctggtcaatgagctttttggcatattccagatagacgccgctggcctgacgctggctctggacataggggccgcagccgccgtccttatccgggccttcgtcgtgaagcaggcctgttttttccagagtccggtagataatgtccacagccccttccacataacgttcctggtctgtgtcctcaatacggagaatgaagtccccgccctcatgtttagcgatcaaataagcgtataaagctgttcttaagtttcccacgtgcattctccctgtgggacttggcgcaaaacgtgttctcaatttgctcatggtgtcttgtctcctgattttttacaatttattactccccacctgagcagatggggagctgttgatctgttttaggcagccgcgtatggctgctgactgttattatatatcaagttcagcgagaatgtccataggttttccgtgaattaccaaatctgccttgtggtctgcaaaatgatcctggtcatttatgagaataatatgttctccctcgaaatatctcaagaaggtatccaccagagcagtcttcatgttgcagcccaaaatcaggagggtatctgcccttcccacctcttccgaggctctggtgatcttctgattgtccaccatctcgcccaccagggaaaccttgggacgtatggttgttccgcacttctcacatttggggacacctttggatttctggatgtactgtactggatactgtgccttgcaatgggggcagaaattctcatacacacttccgtggagctcgatcacattctcacatccggcccgttttgccagagaaaatatatcccgggtaatgatatttttcaggatccccttctcttccaggcgctttaatatgtacacaccgtccttgagctcccccaggtcactgatcataaaattcttgtagaattcatagaactgatccgtcctggtattgagaaagcttgcgttaaacagctcttccggtgagtatccgtaggtgtgctcaatggtaaaggcatcttcttcattgcggtaattggtacagccgcactcagagctgatccgcactcccatgagacaaaccatatagttactttcctgtatcattttcttcagccagtacattttctccctatccatattcgtatccctcctgttcctgtttttccgtccacagctcctaactataggaaaaaagatgcctggcaccttcaagcatctttcatttttccttataaacattatacgctagcattatatggttttcaacaaaaaaactgctttccctgttagaaatttcctgcacacttttttacaggcagcggaaccttcggtaccgctcctttgccagctgcaggggttccttgccctcctgggtccgtagaaaatccttcatgcggattttcatatactcgcacagctccttgagattttcctttcctgccggagtttcctccgggatcacccgttcaatgatccccatttcctttaactgggcagccgtcaccttcatcacctcagcggcctggggcgctttcttgctgtccttccacaaaatagaggcaaaaccctccggggacaaaatggtgtaggtggcgttttccatcatccacacttcattccccacccccagggccagagcgccgccgctccccccttctccgatgacaatggacagcaccggaactgtcaaatctgacatctccatcaaatttctggcaatggcttctccttgtccccgctcctctgcttcaagaccgcagaaggctccgggggtgtctataaagcagatcacaggcctggaaaacttctctgcctgcttcataagccgcagtgctttccggtagccttccggggagggcatcccgaaattgcgcaccagattttccttggtggtacgccctttctggattcccaccacagtcacaggctggccgtccaggtgggcgatccctcccaccacggcaccgtcatctccaaaggcacggtctccgtgaagctccatgaaatctccaaagatttcttctatgtagtccatactggtgggacgcttggggcttctggccgtgagaactctgtcccaggcactttttgcctccgcttttttctcttttttctttccccaggtattcagctcagaggatctggctggtttctccatgggaaaggaaccgtaggaggtatccctcctgtgcaggcgcagcagccttgacagggtttctcttagctcctgcctgggaaccaccccgtcgataattccgtgctccaccagaaattccgccttctggaacccctctggaagctgctgtccaatggtctgggcaatgactctggggcctgcgaaaccgataagggcccccggctcagccaggatcacgtctccttccatggcaaagctggcggtgacgcctccggtggtggggtcagtgagaaccgtaagatagaacagtccttccttgctgtggcgctggatggccgcagaggtctttgccatctgcataagggaaaccattccttcctgcatcctggctcctcctgagcagcaaaataagatcaccggaagacgcttgcgcacagcctcttcaaaggccctggtgatcttctcacccaccacatatcccatgctggccatgagaaaccgggagtccatcacccccagaactacagtctggccgtcaatggaagcctcaccgatgcgcacagcctcgtccagatgagtccgctctttcagctgctccaccttctgtgaataaccgggatactccagaggatcggtgttctcaattccctgaaaccattcctgaaagcttcccgggtctgccaccattttgatcctggttcctgccttcatacggaaatagcccccgcatttgggacatacataggaatgtgcgataatatcctctttgtataccgtctccccgcatttgggacattttacccagagtccctctggcacatctggctgggctgagcgctgtctgtcctctgataaaggctgggtttttttgaaaaatcgttttaagtctgccattgtctcacatcctattcataatgttcctgaatgaatccagtggtaatgtttccctcctggaaatccggctgattcaaaagctcatactggaaatccagattggtcttcacaccctcaatgaccacttcacccagggtgctgatcattttccggatggcgcttttcctatccttgtcatagacgatcacttttacgatcatagaatcgtagttgggagggatcacatagccgggatacactgcggtatccatacgcacgccattgcctcccggcagatgaagattggtgatggttcccggacagggcataaaattatgctccgggtcctctgcattgatcctgcactcaatggcatggccccttaactgaatgtccttttgctccacggataagggctcacctgcggcaatgcggatctgctccttaataaggtccacccctgagacaaattctgtcaccggatgctccacctggatcctggtgttcatttccatgaaataaaactccccggagccatccagaagaaattcgatggttcccgcactttcgtaacccacagccttggcggcccgcacggccgtgtctcccatttttttgcgcagcttgtcagacagagccatacagggggattcctcgatcatcttctggtgccttctctggatggagcagtcacgctcccctaaatgcaccacatttccaaacttgtctcccagaatctgcacctccacatgccgggggttctccacataccgctccagatacatggtgttgtccccaaaggcatggatggattcctgctgggcggtggaaaactccttgtccagctcctgggcagttctggcaatacgcattcccttcccgccccctccggaggaagccttgatcatcatgggaaagccgatctttttggaggctttgcgggcctcctccagggtgtacaccggctccctggttccaggcaccacaggcacacctgcccggcgcatggtattttttgcctctgatttattccccatcttgtcaatgatctctgcacttggaccgataaaggtgaccttgcatttttcacacatttccacaaaccggctgttctctgacagaaagccaaagcctggatggatggcctgggcatgggccgcgatggtggcgcttaaaatacgctccatattcagatagctgtccctggaggaagctggtccgatacagatggcttcgtctgcaagctgggtgtgaagagcctcccggtctgcctctgagtacacggcaaccgtgcggatccccagctcccggcaggctctgataatgcgcacggcgatctctcctctgttggcaattagaattttattgaacattccaaaactcctatcctattgcaaaagtaagctctgccaaaacggcaagggtgccgtcctgctttgtggccttggcttttcccacacccacagggccttttgctttcataatttccagctccagggtgagaacatccccaggcatcactttatttttgaatctagcactgttgatggctccaaaatatgcgatctttcctttattttccggtttgcttaaaatggccacggcccccacctgggccagggcttcaatgataagcacccccggcatcaccggctctccgggaaaatgccctgcaaaatagggctcattgtaggacacacattttcttccaacagcccgcactccaggctccagctcctctatggtatcaatgagaagaaagggctgtctgtggggaatgatctccataatttccttagtatttagtttcatggccatacctcctattcaatgacaaacagcggctgtccgtactccaccatctgctcatttttcaccagaatctcttttacggttccgtcaaattcagactcaatttcattcatcagcttcatggcctccaccagacccaggacctgtccttttttcacagagtcccccacctggacaaagggctggctctctggtgaggaggcctcatagaaggttcccaccagaggcgatctcacaaggtttccctgtaactccagcgccttctcctcctggatctcttccgggacggcaggcatacagggcgctttcatctcttgctgtgtgaacacagcaggtgccttttgttctttgtctgttttgatggagatcttcagatctccgtcctgtatctgaaagtgagtcacatgggactggctcactgcatcgatcaactgaatgattttttcaaattccattggtgtcacctcacgcttgcagattcatcttctgcttattctgcatattttttaactaaaatgctggcattgtggccgccaaaacccagggaattgctcagggcataggtgacctcctcctgtaccggagcgccggttacatagtttagatcacattcttcatcaggcacctgataccccacggtttcatggataaaaccctcccggatggtgttcacgcaggcaatgaattccacagcccctgccgctcccagaaggtgtccgatcatagatttggtagaattgatcttcaggctggccgcatggtctttgaacagtttcttgatggctcttgtctcaaagagatcgttgtgatgggtgcttgtgccgtgggcattgatataagtaatatcctcaagggagatccccgcctccttcacagcatattccatcgccttggcagccccgtctccgtcctcggcaggggaggtgatgtgataagcatctgcggtggttccatatcccaccacctcagccaggatcttggcgcctctggcttttgcatgctccagctcctccagaaccacaataccggccccctctcccatgacaaagccatctctctccttgtcaaaaggaatggagcaccgcttgggatctgtagaggtggacagggcggtgagggcggcaaagcctcccattcccaggggacagatggctgcctctgtgcctccggccaccatcacatccgcatccctgcactggatgctccggtaagcttccccaatgctgttggtccctgtggcacaggcagtgaccacattaatattttttcccttcaggccaaactggatggacacgtttcccgccgccatattagagatcatcagaggcaccatcagaggattgagacggtttggtcccttttccatcagcttgccatgttctctctctgccacctgcaggcttcctgttccactgcccacactgcagcccacacgataggggtcctctttgctcatgtcaagccctgcgtcttctatggcctctttggctgctgccactgcaaactggcagaacagctccattcttctggcggccttaggatccatataatcctttggttgaaagccctttacctccgctgccagccgggccttgtagccgctggcatcaaatctggtgatctctccaaagccggtctttccttccttaatactgttccaaaattcttccacattcagtccgatgggggtgatggctcccatccctgtcacgactactcttctcatggctgctcctcctatatattcattccgccgtctacgctgatcacctgtccggtaatataatcagccttatccgatgccagaaatgccaccatattggcaatatccgaaggctttccgaaccgtcccagaggtatctgggcgcaggctgcctgtttcacgtcctctgaaagcacctgggtcatctgggtgtccacaaaccccggggccacggcatttactgtgatccctctgctggccagctctctggccatggtcttagtaaggccgatgacaccagccttggaggctgcatagttggcctgtccggcatttcccagaatgccggagacagaagagatgttgatgattttcccgcttctttgcttcagcatctgtctggaaaggtgacggatggtgttaaaggtccctttcaggttaatatttaaaactgcgtcaaagtcttcttccttcatacgcatgatcagattgtctctggtgatgcctgcattgttcactaaaatatcaatatggccatattccttcaccagctttttcatcatctcttcacaggcagtaaaatcactgacattgcactggtataaagcaccttgtcctcctgatccttggatggtgtcaaggacctcttgggctttttctgtagacccgttataatttatgatcacaaaggccccttcctttgccagggtaattgcaatctctcttccaatgcctcggcttgcgccggtgaccaaagcgattttattttcaagcattgtccaaacactcctttgccactttttccaaatcttctactttttccacattcagtgccttcacacttctgtcaatttttcttaaaaatcctgtgagggtacggccaggtccgatctccacaaaggtatccacgccctgggcagtcatatgttccacacactgctgccagcgcacagaggaagacacctgtcggatcaaaaggtcctttacctgggccggatctgtcaccatctcaccggtcacattgctcatatagggcacggcaaaggggtggatctccacgtcctttaaagcctctcccagcttttctcctgcctgggaaagcatgggggaatggaagggaccactcaccttcaaaggcaccacccttctggctcctgcttccttcagagccagggaggcagcctccacggcctgggcctgccctgtgatcaccgtctggccgggacagttgtagtttgctatggataccatcccctggatgttttcacagatttcctggatcaccttggcgtccatgcccagcacagcgctcatggctcctcccacaggaaccgcctcctgcatgtagatccctcttttccgcaccagcgaaaaggcatcggaaggattcagggctcctgacgccagcagggctgcgtactctccaaggctgaggcctgcattcacgctggagcgcacccctttttccttaagcgcctccagcatggctgcagaaacagccagcatggcgatctgtgtatattctgttatatgtaaatccggattctcttcaaaacaaagagccggaagatctaagcctgtcacttctgatgccaagtcaatcatcttggcggctgagggaatctctcggtagaaatcttctcccattttggtatactgggcgccctgccccggaaaaataaatgcaatcttgctcaccttagaactcctttgaacttaaaatattttgaatagcaaagtatttacttaagaataaggagtctgcctgggcagactccattgtctgcggcggctgtcacccagcctggtccgctttctattatgcttctacgcctttatttttcagatattcaacgacagaacccaccgttgtcaggtctgccagctcttccgccggaatctccacattgtactcatcttccagagccattaccagctcaaacagatccagggagtctgcacccagatcatctttaaaagaagtccccatgtcgatggagtctgcctcacagcttaactgctccgcaatgatttcccgcattttttctaacataactatttctccttttttttaccattttatccttttcattggtataaatactttgatgctcaaagtatatatgctgccatgctatttgtcaagagccttttctttttttctgtaggagtccttaagggtcctggaatttaatctgcctggacacactcagagccattcccatctctgccagcagaaacaaaatggaggttcctccgtagctgaagaagggaagggtcactccagtattggggatcacattcaccacaacgctgatattcagaagcacctgcagggccacatggataaatactccgctcaccagaagggagccgaacagatccggcgcattctgggcgataaaaaaaagccggtacagaagataaataaataaaatcatgatgatgatcacgccaaagatccccagctcctcacatacaatggagaagatcatatcattctgagcctccggcacggaccacagcttctgaatactattgcccagccctttcccgaaaaatcctccggaaccaatggcgtacaaagcctgcagcgtctgataaccatccccggaagcatagtcctctggacggagccacaccaggactcttcggatacggaagctttcactggtatcaatggtgctggacaaaaaaatcaccacagcggtgatacacacagccaaagcgcctaaggccaccagaaagggttttgtctggggatgtgacagaaacaccagccctgccgtaattcccagaataatgatggcagtacttaagttgtcggttaccttataggcgatcagggatagaaagcctcccaatcccagaagaatgcagcaggccttcaacgtctgcacctgctttcccatttttacgatcatataagaaagacagatgatcaccgcaatttttgccatctcagagggctgaaactgcacaggaccgatggtgacccagcgcttggcgccgtttacctctgttcccagaggtgtctttaccagaaacatgagacctgctgctgccacatacaaaaatgtagtgaaatattttaaaatatggtagtcaaatttagaaatgatcagggccagcacaattcctgcggcgctgatggcgccctgttttttcagcagatacatgtcatctccattggtcagctgagaagtataggcactggtgctgtacagcatgatcagtccgaaacaagttaaaagaatgatgactgccaccaggctgaaatcgtaaaaatctgcttttttggagacttttgcctgaggcttttttttatttttccccatggattctcccatcttccttcaaatctctccctatgcggatcctctgtatttgccggaaaaaaccgcacaggatatttaactggttcctcgcaagtgctcctattatatcacacccctttctaaaaacaaagttttttctcttaatttcccgtgtatgcccgggttttcccgtcactgccccccaggatagagctgtacagggccgggaaacccttcccggccctgtttatttactggatatcaatggcgtctgtctctatgataaatttcacatttccttccatctcactgtcttttccggagaaggaatcatattgaatatcctgagaattcagtaccttcagtctctccaggaactgctccagctggccgtccgccgcctgggagagcttctggatcccttcctggtcgaatttctccattccctcttttaaggtaagcgcgccgtcagaaagctttaagatcccctcttccacctgcttatttcccttcaccagactcttggttccgtctcccagctcctgggtgccgtctgccaaggtcctggctccttcccgcaaggtggagctgttctgtgaaagctggctggaaccgcctaaaatctggctgcccgcactgcttaaagctgccgctccgctgcctaactgctgggaagcctggctgagctggcctgccccctccaaaagggacccgctgctatccagaagctgccgggcgccctgggtgaggaccggggaagcctgctccagagtatctgctccctgggtaagggctgctccgttctgtgtgagctgatccagacctccggtaacctgtgaggatttggataccagtgtgctgcagccgtcctgaatttgggcgatcccgcccaccaaagcctggcttccctccaagagctgagaagcccctgcggccacctgcccggctcccgcggacaactcgcccactcctgcaagctgctgtccaaactggtctgccccggcgcttaactgggcggaagcatccgctgcactctgagccagaccggcaatggcggacagcccccctgccgcctctgccgctgcgcctaaattaccggctgctgagcctgcactggctccaatggaagctgccagattctgtacctgggcctgcacatccgggtctgtgatctgggccgccgctgcccccagctgctctgccagggccgccacattggccacatccccctgaagagctcccagacctgcactgatgccgtctccggcgcctcccgcggcacttagctgggaagacagctcgctaagctgtcccgccaggccgcctagctggtccgtgagggcactgccctgggctgccagagcgtccacgccgtccttcactccctgggctcccccagccaaagctgccgcctgatccggaagacctgccgtctgctgggccagcgcatccaccccctgggccacctggctcacccctgccacatactcctgggttcccgcagccaaagtgcccactccggccacatattccttggttccctgggtgagactctgggctccttccacataatcacacacgccctgggccagtgtctgggcgcctcccacatattgatttaccccatcaatgagcgtgtttgttccgtttatataagactgagatcctgccacaaggctgttggccccatccacataggagcccagtcctcctgccagggtatctgccccgctggtataagtatcaatgccctccttcaggctgtctgccccggactgaagcttcgatacccccgtatccagggtctggatcccctgggaaaactcctgatacttttcacttaattcctttgtcccgtccaagagctcaccggacccctttaccagctcctgggaagaatctgccagcttatccagggcatcctgaagctcctggggagtggaaatatctgacagatccagatccttaaaaatatcagtcagggccagtgtaaaggtagaaccaagttcaaaatccgttacatctgcatttactgtgagagactgtggaatgttcaggtggacaccatctaagccttggtccgtatcagaaagctttgacagcttcagactgtcctccagccctggaaatgccattccgaacacaatgtccctgcttccgtcagagatcacttttccattgtcaatctgtacattccggaatttgtctgtgggcagaaacattcctgtgaccatcacaaagggggcatagatttcttcctttttcgtgcctaccttctccatatatttctcgtggttggtatactggatcctcatttccaggtgaccgctttttcctgcgatctcctggggagtcatggccttcccgtccaggaaataggagatctgcactgtgacagggagctgcttatctgtcttgccctggtaatagatatcattccctgaggtctcccacaccagggattttccctccttgctgtaggcctcatctcccttcacattttcaatgtcctttagctctgaggtatccttgacctcttctttctctccgctgtttttcagccattgggaaaccgtcacatcctttgcatttcctgtggggtctgcattcacataaaccgtttcttccttatatacctcctgtgcgccgcctgctggcgaggcggcgaaaacggtaccggcccccaacaggaccgccaggctggcgctgaaagttgctgctgtttttctctttctatttcgattcattgttcctgctccctttctatttattttccactgcatgaagctgtggtctgatttttttctttctggaatatcccaaggtggtatgacagatcacgctgtcaaataccataaacatggcaggtaaaaccaggatcaccaccagggtgctgatgatcgctcctctggacagcagggtacagatggcgccgatcatgtccacctgggaatacaggcctacgccgaaggtggcggcaaagaagctgcatccgctgataatgatggatttcatggaagccttatgggcaatggcaatggattccttcttgcccaggcctttctgacgttccttctgatacctgctggtcataagaatggcataatcaaccgttgcgcccagctgtatggttccaatgacaatgcttgccacaaagggaagggtgattccctggtagtaggggactgccatgtttacgcagatagcaaattcaatcactgccacaaggatcacgggcagggagatggatttaaatacaagcatgatgatcacaaatatggcggcaatggaaataatattcacatttcttaaatctacctctgtcacatccgccaggtctttggtgagaggcgcctccccaatgaccatggaatccggactgtatttctttacgatcctttgaatggactcaatctgtccattcacttcatcggtagctgtgcggtactcggaacacacaaactgcagctcatagttgtcacttttcagcatcttcttcacatccgaggggatcatgctgtccggcaccgcagggccgatgagagaatccattcccagagcccagcgcaccccgtccacctgttcaatctcctccagcattctggatttttctttgccctccagaccgtttttcagcagcaccatatgcaccgtgttcatattaaagtcttcttccagcttggcgttggcctggttgctaagaaggctctggggaagagactggtcaatgttataataaacctctgtgtggttgtttccataaatggctggcagaagcatcaccagaaagatcagcagccaaaccttgtggtgtctggtgataaaggaggatgcctgatccaggctggggatccaggatttatgcctggttctgtcaatggccctgtcaaaggtaaggatcagggagggcagcaaagtcacacagcacaggaccccgatgaccacacccttggccataacgatcccaatgtcccggcccagggtaaaggtcataaagcacagggccacaaagccggccactgtggtgacagagcttccgatcacagacacaaaggtattggaaatggcgtgggccatggctctttccttctgctggggaaaccgccgtttattatcctcatagctgttcaaaaggaagatggaataatccatggtaactcccaattgaagcactgctgtcagggcctgggtgatataggagatctgccccaggaacaggttgctccccagattatacaggatggccacaccgatgctcaaaaggaaaagaatgggcaccacaaaggattccattgccagagaaagcaccaggaaggaaagcacggcggcaatgaccacatacacaggcatctccttcagggacaaattcttaatgtctgtgacaatgcctgtcatgccactgataaagcacttctcgtctgcgattttccgcatggcgctcactgcctccatggcttcatctgaggaggtggtattgtcaaacagagcgatcatcatggtggcatccccgttaaaaaatgactcccgcagatcctttgggatcatctccaccggcacgctcagatccataatatcatcgtaccagagaacattttccacatgctctacgcccttgatctcttccttcagggccgctacatccttgagatccatatcttccaccaccaccatggaaaaggctcccattccgaattcatccaccataatatcctggccctccactgtttccaggctctttggcagataacttaaaatatcataattgactctggtcttcaaaaatcccagcgtggccgggatcagcaaaagaaaacaaataaccaggatcagcctgcggtgcttggcgatcttctttcccacttctaccatagttctctcctcttctatttttttattctcttacatcttattcattttatgactgatggtcatttattaattcgtagaatgttataccgctaaactgactattagtcaatattaatcttcgaatttatataaatttaatatattgacttatagtcagttctggtgaataataaatacataggaagataatgggaagaacgcttccctgactgtaaaccaaagactgaaagaactacatttgctgtttgcagccggcaatacctgtgaaaagcagcggctgcaggaggttttcattatgggaaaattggaacttaagaagaagagaaagaaagaggccctgtttaacacagcctttgagcttttttccacaaaggggctggccaaaaccaccatttccgacattgtagaaaaagcaggggtggcaaaaggaaccttttacctctattttaaagataaatatgacatccgcaacagccttgtgtcccataaggccggggagctgttcctggaagcccgcagggcgctccaggcctcaggcatcacggactttgaagagcagattctcttcattatcgaccacatcctcaatgtgtttacagaaaatcactcccttctgcatttcatcgccaagaacttgtcctggggggttttcaagggagcctttgagggaaaaacgtcagaagaagattacaatttctatgagtcgtatctggaattgctgaaacaaagcaagtatcactaccaggacccggatctgctgcttttcaccatcatcgagctggtaagctccacctgttacagctgtatcctgtacaatcagcccgtgtccatgaatgaatataagcccctgctgtacaaaaccgtccggggcatcctgcgggattttgcggacagcccggctaaagaaagccaagaacaaagcggacaagcccgcttcaactccccatcccctcactcatgaggggcttggcagctttgtgcgccaatgtgcagccgcaaagcagctttccctggcacattgtgtgcatccccggagggtttttattacataggaaagttctaagaactttcctatgtaataaaaaaaggaggatccggacagcgctctgcccgttcctcctttttctttcatgggttttctgtggacgccaggtccgtttaaataaacaaatctttcctgttaaatctccaaatcccggctgcaaacagcaggatccctcccacatagagaatgcccatgcatagataggcctggctgtcacctgccgccagctctcttggcataaataaggtgaggggagtggcatatttcagcttctccagctcctgtcccacctgtgacagcatctgcagaaggataaacacaatacacagccctgcccccacgccattgctttgccggccttctgaaaacagacaggaacaaaaaaaacacagacctgccaaaaacacccacagtcccagacaccctgtctggattaaaaacaaccccggcacatccagcttccctgggaaaaaatactggctcactccaatggcaaaaagcaccatgcagatactcagcagcaccagattcacaaaaatcaccagggcctgagtaaaaataatctttttcctgctgttgggagttgccagcaggtaggccagggcccctttttcctcatatctgatgatcagccggttcaccaaaagaagcaccagcaccaccgggaatacgatcagcagaaagccatacatatagttgctgataaagtccaaaagcgtgcttcccggatctgacatatgaaaagcggcaaaaagctggggcatggtctttgccattaaattcaggctttctcccagcttggggtcaaacatcccaatgatcacggacatatataaggagagaaccactgcaaagatcacaagaagcttccagcttcccttcatttcctttttaaacaatgcactgctcatctgatttctcctccttcttttccatagaaatgcaggaaatattcctcaagggtctgaggattgctcctaaaatctgaaatttcataattgctcagctctttgatcagctcatccaccgactgggccttttccagatggacgttccttcccttttgctggctcaaaggccggccctgggcaaatttctccgcctcctttactgtggcaaaccggatgtcataacggtttttcctgtttttgcggatattttccatggactcaatgctcataagctgtccctcccggataatggccgccctgtcgcaggtcttctccacctcctcgaaaatatgggaggacatgaagaccgtggtgcccttgtcccgttcctccaaaagcagctccacaaaggcattctgcataaggggatccagtccactggtgggttcatccaggagcataagctggggttctcccataaaggctgccacaatggccaccttctgccggttccccttggacattttccggatctttcctcccggctccagctcaaagcgctccataagctcccgggccttttggaagctggaaagccccttcatatctgccagaaaccgaaggaattctatggccttcatctcctccataagggcaatttctcccggcagataccccacccgtgtctgaatctgttccctgtttttaaaacagtccatttcaaagatacttgcctttccctgatctggctttaggaaccccataagctgacggatggtagtggttttccccgctccattgggtcccaaaaacccataaatttctccctgctccacggaaaaatccagatgaaatacaccctttccattcccgaaatcctttgtcaaatcctgtacttccatcaccttcatagctccagatactcctccttgtaagcaatttttttcagcattccaagccaactttcgtagatttccatcatagcgtccagatccagctcctgtcctttcatctgaagctgatgaagatacccgtctgacatccacagaatcatctgtatcacatcctcaggacctacctcctccctgaatttccccatattgacattaggaaaataagtggcaaacaggtccttgatatgcatctgcatataatttttcatgtcctggctgatctcttccttctctgtataaaaggacttcatggaaaagtccatcaggtacggattcttctttaaaacctctgctttttttctcacggaatactccatcaattcaaagaaatccgtgatctgccagaatttttcatcaatcatctccatctccatactctgtgccacataatccaccagaaaggaatacagggttctcttatttttaaaataataaaacaacagtcccttggaaattccagccttggcggccatcaggtctgtggaggccctggtatattcgtatttggaaaagacctccaaggccccgtttatgatcgcctgctgcttttcctgaggcaggctgaaaaacttctcattcatattttttctccattgaccagattgattaataccattgtatcctgttgactgaaaaaaacaagaccctgtccgcgcacttttctgaatatgtcataaacgaaacatgtaaacagaagtttttcaagaaaggaatctgatccatggaaaaatatccgatgaatcgtcagggcggccgcggcatgtacggaaactgcccctggccatggcctatgtgccctatcagaattttgccaccacctttgacctttgttttgccttgaaggtaggaaccatcttccctgacctttgcaaaccattctgcgaaaaaggaggtctttgccgatgaccagctgtaattccaactgctctgtttccagagagcagcttttaagaaacttgatgaagtcagctttgcggtagatgacattttactgtttctggacacccatccccaggatgaggaagctttggcctacttctataaaatggaagcagaaagaaaagcagctatgaaaaaatatgccgataatttcggccccctcaccatcgacacggctgacgacacgacttccacatcctggaagtggattgagcagccgtttccctgggagtaagaaggaggtagaaaatagaatatgtggaattatgataaaaggcttcagtacccaattaatattaaaactcccaatgccaaaatcgcaaaatacattatgagccaatatggcggaccagattgcagaagcctatactaaattttcctccaacaactgaattgtcctgccgtcacgctggccacggtagaatttatccagaaccttctggaaaacctcttgtttcggatctgccagcgtgaacaatgtcatagaagactgcagcttcatataatcaggactgccgaatacgatataagcatcattggtttccaattccagcaatgctttcgaaatttctatgagacggcctcccagaatcccatcgtttacgtattccaaggcctcctgaaaattggaaatggcataatactcagccacactgctgtgtcccagccctgcaatctgtggaaatatataccacatccagcagctacatttcctgccgttacgaatctccttcaatgcgatctcataatcatatttctgcgcttcataaaatctcgttaaatccatgctttcatccccctaaatgcttaacctgcctacttttttatgcaaaatggtaatgattcatatcataaaattcttggtaaaataaatcctcagatttaaattccactgtaattttttcttgggacagttcacaaaaagcgtctcttagcttctttacatcgtccccgcaataaacccccggcttataataagcaatcgtaatatggggcgtcattgcgtaacccaacggacaaatattctccatcttttcatacaacgctgtcaggcggccgcagtcactatctgtacatggcacgagccccaataccacactggtattgaccatattaaacacacatgttgtctccaaccttatcttccatggctccttcttaattagcaacaggctttcttttaccactgtgcccaccgcttggatttccccttctgataaaacatccggcaatccatttttcagatcatgcagagtcatatgtaaggtattcgtaagcaaaggttctgccaacatgttatggcacctgtttttaagtatatcctgtatccctatgatacgctttctcaggaatctcatctgctcactgttttcatgtacaacaaaaaccgtagtatttccaacataaggacgcagatttccttttccatctactttatcagtaaggctactgttcgttgcaaaactccctttttcgtcaagatgtatactgttatactcaaattcggaaatcctgttcttcatttgctccaatgtctcattcatatctttttctcccatagtcttgtgtgtatctgcctgcgttcatctccatatcctaaagagaattttcctcatttacataataaaatagatcttgtctccattaaggcaaagcccagaagattttctccattccagttatttggattctcaatatccggattatccagagcaagtcccactccccagattctatcataggggcttgcttccaccaaaacaagctctcccgttcccaataaaaactccttcagttctgtattctgtgagaatttcgcaagattgccctttaagacaatctcatatctatgcatctcccagatgtcttctctaaaattactaatctgtcttcctaaccctttgtaagctgcagggttatcagcactcataatttttccatagacttcttcatccttgaacaatcgtgctttttgtgccatcatatattgttctgtggtatgatattttaccccatccacttcaaaatcacagggataccattgactaaggcaggcctttctgatttttcccggttttgcagtatgtccccagaagaaaaggaaccctatttctttaccattgttaaatttattaataatttcctctttctcatacttcatacaatcatacctttgttcaataacctttctcttattctcataagaatttctcccaaccggttctcaccctggtcactataaagatcccggccccagaaggtatcctttccattattccctgcaaccagaacagcctttccggtctctttcaaccttcgggcaagatctggatgctgcgaaaacttcgcatacacaatttcttccatcactgcggatttcaattcttcccagtcctttcgcgcccttatcttgcttccacgctgctttgctttctgcccatcgcaggaagtaaatgagagaaaatcttcctggaagctgcattttgcggcctgaaacgcagattccgcacatagccagctctgtcccctccattgtattgccacgggatagctgttgcttaagaaatcgtattccccccgaaaagaagcaatctctctggcaaaatcttcggctgataaagttttcagtatggcccacactgcgggatgaagatagatttctgtgcattcctttctaccttccattaggtatctgcgtacaagtgtggaactgattcctccagttccttctggctgggaaagaaaaacaaagctcgcataatactcgcatagccttttatccttcagtacctgtacttccgggttaatttcttcccggcaaaataccacaacatgaaaacggtcaaggaaatctgaattttcacaccatttaccaattaagtccaacttatccacccctgccagaaaatacaattccgcctggggatacacattctgtattttcatcatcgtatcataggtacgaaagcagctagaatgtaattccattttactgacagacagacgtatatcttccatacacattgcattaagcatttgtattctctgttcttcactcatgcagatttcttcattttttgtgtttcgcatctttctttttaaatatgcctgactggctggaacaaaaattcctttacaagcctcaagttcctgcaccgcatacgtcatcaatttaaaatgtgcaattgtaggaggatgaaaagaaccacccattaccacaaccctctgctttttcaataattcttctgtttccagttttcttttcattttctctgtctcctgccgcttatgccttttcggcatggaagtgtggtacttccctgttaaggtcaaatgcagtaccactttacttcctgcgcttcaaaccgctctggcaataccaaattcttcatcatgctgcagattacctgttctgaaaccttgtcttctctcccccgattcctcctcatctgctcctcccacccggtttcaaggaataccattcttacagaagcatgataattttcaaatagacgaatctgtttttcccgaagcatgggggtcaggcatgtggcgttccacacaaacggcactttatttcgcagataaccttttgccagctcacgggctgcgtttattaccgctccctgggcctgtgtgggcaatattttaatctcctttcttatattatccagtgaaataaccgggtaatctgcataatgttcccttatccaggtatcctttcctgttccgggaagtcctgccaccattatcacttcgccccaggtgtcatcatacaattcctgtccaggcaaaatatttctacccttcagatatgcattttgtgaatatgccgtggggaattttaagggagccttcatgcatcctgcctcttttgccaggacactgcacagctctatcatttccaacgaatcatccacataatctgatatacgcccactcatatccgccttttccagaagacacagcaattctattgaaaaatccggaatcagctcaccgttacatgcaattttaagaatccgatgtttccagtgctcctcattcaaaatgtgaagcggtatggaatgataccgtataagtgtacatatagtctcacgaaattcctgcagctctttggttccacagaatccatactctctccagagaacctctcttgccatcctggcacccacggaagtatgatttggagatatccatgtatcttgctccatacgggtacacggaatcttccctgcatcatgcaaaagggccgcaaggaatacaatctcctgctttcttctttccaactttctatattcttcaagagaaaccaatgtaccgcacaccattttcgtatgtgtccatacatctccttccccatgatataccggattctgcctggtttgtttcatcttttgtatcagcagagacaatgcagaaccttcaatgagctcccagttgatttgccattccggccacacgggaaccatgttgagcatttccttccatttttccatatcacgattcctcaaataatttttctatgggtactgccaactgattgggcacgattggcctgtcaagccagtgtgtctccgatacatccacacactgcagaaaagatgccctgacatatttcatcctgaatgccacctccccatctttctcttccttgatatacaatccttccatggttgtgaaggtatccgtctctgtgcattgccgttctgcatccagtcccatccgggcagatatctttctcagacacaaaatgtgattttgactgatataagatgacggacctaataaatccaataatttttggtgttctgtaaaaataccttctgccaaaaccgggacagacaccacgggcatctgctccgtcagtttttttctggaaggtgtatccagaaaaattcctctggcacggtcaaaaatatcaaactccagaaaataatggggcagggcgtcataaaataccgtatgctttgcatacatccattctccatacataatgtacctgcttcccagaacctggtaaaatgcatcccgatgcgcgctggcccactgcttcatcagattataatgccgttcccgatatcctcccgtgagataatgtccccggctctgcagcagcagttcccctttttttgaaaaggatatggcagaattggccccgtcacacttctcctccacaacaaggtaccgtcccgcaatttctgaaaatcgaatctgagatagatcttcatctccgggctgaagccgggaaccttccagatgcggcgtccggggatattttctgatacgaacttcctcacacatttctatcacctctttaccttttttactgctttttacactgccgctgccataaacaaatgtccccgtacaccgtcaaaatgaagacggttgcaccctgctgcccggaacatctctgtcaaaatctgctttgtaagcaaatggatatgctccggattatcatctggtttagacggcactgtcactactacatagtttctcgccatccgtacagccgctttcacagccatttccacatccgggatgtgttccagcacctccagcatagttaccacatctacagatttttctgggagcggctgcgtacaaatatttttttccattgcacagagccgtgtaatccctccattatacaaattttgaagaaactctacccgatagggaagaatatccaccgatacaacctgcacccatggaaatttttccaaaagcggaaagagaaaaactcctctgccgctccccacatccaacaagctttcaaattgtacggattttaaaaaactcagaacccgctttacccttggcagatcttcgtgagtatttttaaaaacatacagcttttcttctgttttatagccaagtgccaaaatttctccaatttcctgttccgtaagctttgacaattctttgtataaaagctcctttttttcaattcccaccgtttccttctttctgacctttccccgaatataggcagcagccagccgatcataatatatggagggttccatttatctcaccttcgtcctgtattcttcctatcatcctctgcttctaatatagtttatcatcttattctatgattccggtcgcctgacaggctacattttaaaagcggtacatggcgtgcgaaaccatgtaccgcttgctggcaccatagagtatccgaatcaggaacgcatatgcttgttcaatgagccacaactataaaccattccacaacagctcctttcgcctgcttttgaagcttcagatttgtactttttaggcactgtatacgtctttttcatttactttatctcactttctatgatgtttaaggtattctttatgattggcacatgcaatcaaacagctgtccgcacatggcgcaagctttccgttttcacggaatgcaccccccatacataccccgcaccagggtttatcagaacaggagccgcacttttggctgatatcattaaattccagttctcctatggcttgtaagtccggggaattttcccagatgacaccaatagaagtatccctgatatttccaagcttaagtggactggcattacacggatgtatattgccgaaaggatcaatggataatgtattcaaaccactgaaacagatgatatcctcacgtcccgtaacctccaggtcaacagaatatataccatacttatattctaaatccaaaaccttttcatatgcctccgcctctaataaccggaacggatcagccgttttccccttatgggtgggaataatggacaggcttgatgagatggtaattcccagacgttttgccaatttcaacagttcttcgtatgcatccacattctgtttcatcaccactgtctttatgtaggtgtcaattcccgcacatttacagatcatcatggtacgcagacttttttcaaaggatccctttatcccggtaatccggtcatgaacctgcgccgtacctccgtaaaaactaaatgaaatgctatttggtttcaggctcaacaggcaatccaacaattcctcatccagagacagcccatttgtaaaaatatccaccagaagtcccaatttcttcgcatattggacaattctcagaaaatccggatgcaaggatggttcaccgccggtaatcaaaactcccatgcatcccatatccttcagctcctccagaatctttttataatcttcaaactggagttcatatttcgcatttgacgggtcgtctatatagcagtgaatacatttctcattgcagcgataggtcagctccaggcaaacattcagcagacagtgattctcacaacattctttctgaataaactcccgaatactttccccctgcatggacgtccgatctgtactttccggtagcaaaattccactctcatacaaatcctccacaaattcccggacatctttttccaaaactgtctccccgccaacctggtatattgaggacaggcagtcacaaatctgttcgatagaacaacctggctgctcttctatacaatgaagtatatcgtaggagatttcattaaacaaataatccttctgctgtgccacatgtcttaaataggtgtattctccatatcgcctaacatatacatccggatctaatttcatagtatcaccttcgcctttaacggttgtattgaaccagtttaccacacacagcgcaaaaaccacatacgctgttgttgctagctgcttttacctgttcttttaccttttgaggtgcggcatattcctttttcttcatcttggttctattcatctcaaactcctcctttttcattaccctaattgatttgctgcctctgacaaaatcctgtttctttcttcttgcgtggggttgcgtatcccagtcttcttatttttacctgaagccgccgccaagtcatccagccccttttgagtctggcggcaggccgcctctagctcctcctgacttaccacatcttgtccggcaatcacggcattaatgcaggcctgttttacagcatttcggatatccctgccacagaaattaaattcagcgagcttttttatatccacttcatctgaaagggggatgttcaacttcacatcacccacagaatacaaatggttataccagattttctcccttgcggctgcatccggccgcttcatctccacacaaaccaatctggtcaaaaatgctttatcgtaattttcaattaaatttgtggcaaaaaccactataccatcatgattttccagactgatcaacagttggctgcgcatagaattgatggcctgctcagacccctgggtaacattgcttaggcgggcagacagcatggaatctgcttcatcgataaagagtacggcatcctgctgttttgccgcaaggaaaatcccctttaaacgttttggcccctccccgtgaaatttactctcaatatccgcataggaagcccggatgattttcttgcctaaacgatgggcgattgcctccgccgccatggtttttcccgttccggaatctccgtaaagattcagcagcacagaaggactcatgattgcctttagcccccagtcctcaaacagtttattccgattctcaagaatagcaattgaggtagtgagctgctgccggacttcgtcagataagaccagccggtcaaaggtgaatcttggatcctttgcttcaaactgtctggctatttccagatactctgtaaaatcagacccggaagtctgctgttgtgatgtcttacccgaatctccttcgctcggaaaaccgtcaggaagtctgatatcttttacaaggcaggtatggacgtttcccccgtaccccaattccggtggtatcacatcgaacagccgcaccgatacctgctttctgaaatctgccattttctgaattgtattgggaactttgggatactcctccagagcaatcaccatgtcatatttttttgcaatgcactcgttcgtctcgatctgcatgtcattgatgatgtatacccttgcaaattcctcagttacaattcttttaattttttgtataaccagcttatccatctggctttcgtgaaaacctgaaaacaatatgtaaactttcatagaaatcacctctaatttaacaatccatgataaccattccttcattttcatccataaatttattcagattctcatggattccctcttctcccttgattcggattacctttcctaccttaccgtttttcttcaaatccgccatgaccagctcgctgtcatccatttcgtccaaagcagataactgatccgtagtcaaatggacaggttgttcgttttttaatgcttcctcaatccagccttttaattttttcttctgaaaaatacctactgattgaattccccatttttttagacgttccaaaactttttcttttaatttcattcctgtaagaaaacctgccactataattaatgccgccaaaacaatcagacctataataattgcaatctgcatagttcttctccctcccctactctaagactggtttattcataattctgctttcttcaccctgcataaacttcttaacggagtcatccagatagtctgcattgattgtccttccaaaatatgccttggatgttttcatcagcggctcattgtccgcatccagcagtacctggctcacactgtacccttttctcgtctgttcaatatgtaacagacattttgaaccgcagggttcctcttccagcatttgcagaaaaaagccatatgccatactcattttaaaaactgaaacctgattctcattttttgcaagaagcttccataacaggcggtctgcactatcacgtaaagtatccctgcgtatctgacggcccttttcttcccgctcgtcatcataaaaatcttttttcaaactcataatcattcctcccgcctgttcttttatacaatattatagatgatgcttcctttgtataaatcctcaatatagtttccggtaatttctacttcacattccttagtgttatccagctcgtttaaaagatcgatcttaacccttttcatatttccgttgtttgtgatttgtgttataacagctttcgtctttttgtttattttcaccttttgaattgcagactgtataacactcttaatgttactgcgattcaaaatttcaactgtcattttgtagactgcgtagactgctaatataccaatcggacccaggaataaataggacagcaacatttttttatcctccctttttctttatgactccagtataaaggattgaacgcaaatgttgttgcttttcgggcaacaatcaaaaggtaattgttattccaccagattctatgttttctttaaggttaggcgcaattgtctcaaaattaattagacgataggataagcactcctttgtatcttctctcacaagcatctgcaacagatactgttccaaatccatgtcttccggaaagtcgtaacccaaggcatccaccacctccgctgatgcatattttaggattccaaggttccgtccgggaaatgctctattcttttcatgaaaccagtccgtgcagtcttttccggtcacttctgaaactgccatactctccgctaataattcctcaaagggttttcttattttctttcctctgtttacggatacaatcacacctgctgctactgccgccagaaaaatgacagcaaaaataataataatttttattccgctcatatttcacctctcaaatatggctttcccgccgttttcttttaacaaggcttcaaattttggcggaagtttttcaaaatttaccagccgcatctgaatgacctcttttgttgtattttgaactgcctgcaatagataatgttcctgatccaaaggttccacgtcagtaatgtaaaactgctctgccacctgcggggtaaaatatgctatatacataatcgtctcatcctctgtatcctttgttacactatcaaaccactccctggcctttgctgctgtaaacacatcagctacatattgctgctgcagtaaatcgtcaaatttctttttttcctgtttttttacttcttcgtctgcctctcgtttcacatcattgagcacctttgctgttcctattgctgcccctacaactgccgctgctcctaatgtctttaaaaaagaattttttcccatcctcttttcctcctcctttacaataactgcttaatcttcacaagtattcgtggaatagaacattttgatccattccagtaataattaacaacacgccgattattgagccgtatttcaatggctgtgcccacatcaacccctgccacttcccctgtaataaaatcataccagctaattcttcttggaatccctgttccggaatttttataaatgccatattgggtaatggctatcacttctttttcactttgaccctgccctaacaattcgaatgcataaatccgatcctttttcggaatccataaataatcccgtatgttagaaagctgattaaaggtatctgatgcagcgtattccgttgattcctcaaaacaaaagtgaaagttttcattttctcctgccggatactgcttttggtaccaccttaaaactaaaataatcttatttataaccgtaccattcctgttttctataggctgataatattttgctgccgccggatgtcctttttcaacagccagacccagcagccactgtgccatctccttatcttttggcagcagtttttccaaaccgctgccaaaacagattcccaaaccataaagtccgtccacatcattttgcagtgctgcttttcgcatgtagtatagtccccattgtggactctctgacaaaccatttttcccccgaagataagaccgggccagaaaaacgtacgctctgggattattttttatggcagcagcgtggaacaatagaagtcctctttccatattatctacaaatgtctctctggcctgcgcatacaatgcttccccgtcctgctttaaatccattccaaaaagtgaaaaactatgataataaacataggaaaattgctttttgcagctttccgaaccccaccattttttcaatcgtgaaatacgaagatttccaaatggctgctccagctcctttgccaatatctgaaaaaccgcctgtcccacctttgaaaactggctgatatccggtatttcatcgaatacaacggcagaggattctataaacctactttccccctctatctccccgcccatattacacattagattacgtaccactggttcaatccttcccacggctatagcagaacctcgatctgccgtatattctgctgccagccgccattccagcatcagggtcttgattgattccaccgcaaggtttccgaccatggggattcttaagagcaaaacatccattaatttatccatattcataaaacaaacatgaccataaataatatgacttagttcatgtgcgaatactgcgattatctgttcatcagaaaaccgctccacacattcactgcttatgacaatggcacaattattgtccgtaccaactgtttccgcccccagcctgtgtccaaaagaaaggtatacaggaacatctgtcgatacatccaaccgctctgctgcagtcagatacagattatataattccggttctgttttttccgtaaccaaaaaatttctcccctgcaattccgcaaacgacgtcaaatccgcatagactgtattaaaaaagtctaaaatcgtacgaaatccctcagccttggtcagcgcctgcagctttaccccttccatctcatcttgaaaattcgccagcataaacttcccccgttatattgcttcctggtataatttttttagttctttatatctgtctggaatccacggatcgtcactgcgcaaagaattcaccttttttagggcatcctctacacccatactttcccaaaactgttttgcctgaggaagataccggtcctgtgacgtaccaagcagaaaacggtccaatatattctgaggcagcatatacaccagcaggctgcgaagggccagcggataatccagagttgccagataaaaagctctgtcataggtaaaaaatctgcaacggttccaatcatttaaaagagcatccagccccttcaatattaaattgggaactgggaaatactttataacagtctccataatccagaataacatcatacctttattatgacatgcctgaattcctgcaatctgccccgctataatgccaaacagcatctgcggtgcatcctttaaaacagcctctagaaaatccgaagatataagcagaaacgggttattcagaccgcaaatctccacacttttatcataattccggtacagatatacagacggaaccttttccaatccaaaaatcccgcaagcttttctgaccatatctgtaatctccggaacatttttttccgtaacagggatacaggatgtttcgtagattccccgatagaaatcctctatatgttctttttcagcccattgaaagattttatctaccatttcattttttaaaatgtcagtaataagcttactgtctttttcatgctgaaattgatcgatcgtgtacccccagcaaattccattatgcactgcgatttcctcctgtggcatcctcacattaatgcaataaatatcttttccttaaattttgataacctttcttataccagccatatacatcctccagcatatcattggccgcaccttccatataagtcgcatcaatccacacttgcgccgccttgttgagcatattttttcttgaggcattccgatgaatctccattaaatattcttcaataaatacctccgtccttttttccgatgtaaaaagacgcctggtgacagaaatcggcaggcccaattccagaaagtggcacttagccagaccggctatggtctggcaggccagcagtccccctcggtcagaggttgcatctgccaggtgcaggtaacgcttgaatttaatctgtggaatcacggtccaaaaattcgctcccatataggccgccactgtggtgattttcacatgtccggccataatcatagatatggcgtttccaaataggtaatacagcatatcctcatcaaacatctttatcacataatccgaaaccaccaaataattcttttctgaataaaacggctggaccagctgggacatcatatggcatatgtacacatccggtactgtttcataatccaatatcttacacacattttccagtattgccataatgcggggcgccgcttcgtaggacagctggatataagtgccttccacaatggttttattcagtttcagattcatatcgctcaaaacagacaccgccttctgaaaagcagcagaatgaagcaccacgtcttttgcctcttcctcttccggatgaatataatcggaaaccttaatatttttccaaataattttctcattcattacaaatccctctccttatgagaccctgtttatcagccaatttcttaattgggaataattctccagcactgtgcctgtgagcatattttctttataggccgcctgattcataagaaatccggatatatccagctgcaatagactcctgcagttatagaacataaaactcatgtcctgcacaagccctgtagaaaaattactcacatccaatttcttcagactgctgcagttataaaacatatatcccatgtcagatactctccgggtatcgaaattggccacatgaagctcttccaactgctcacagccgtaaaacatgctgcgcattgcagttactttggaggtggcaaagcctgatacatccagctccttcagagaaatgcaattataaaacatccaggacatgacctctgttctgcctgtgtgaaagccgcttacatccaattgctccaaagccatacagttataaaacatagcactcatatccgtgacccccgtcgtatcaaaggaagtaatatccgcctccttcaatacattgcagtcataaaacatataagccatatcttttactttttccgtttcaaaaccagataaatctaatgactccaaactctcacaaccttcaaacattcccctcatattctgaacaccagaagtatcaaagccggacaaatccaactgttttagttgatgacacctgtaaaacatgacgttcatatccctcacgcctgccgtgccaaagctgtcattaaaagaaatattccgcaggttatcaaaacaggcgaataaggccttagaattctcatttgccacaactccgccctctgacgctacataaagatcatacagctttccatttttctgggtccaggccagaacgcttccatcgccgcttgcggagacatcccatatgctgccttgcgcatctgtggtatgattcagaaaggagatacttgcgatctcacagcgtttcaaatcagtgtttccaaatactcctgcatctcgtccacttccgtattcccagtcgaatccatcaaaatccactttttccactgccattaaggtattcgtcagcggccttacatccaaaacatcctttccatcccagatcgtgcccgtaagcatattgtcaacaaaaaacaaatttgatgtatcgaatcctgacaaatccatatgggacaaattgacgcagtaatagaacatatagtccatatcccttacagaagaagtgttaaatccgctcacatcgagttttgtaagactgacacatctactgaacatgcctttcatatccgttacctgtggggtgccgaattcactgagattcaattctgtgagacttaagcattcagaaaacatgtaactcatcttctccacgttcgtattgacaaatcccgttaagttcaactttgtcagactgctgcatttggcaaacatataagacatatccgttacttttgaagtatgaaacatactgagatccagctctgtaaggctcatacagccttcaaacatgctgctcatgctttctgcccttgaagtgtcaaagccatccagattcagcctgacaagctgcctgcagtctttaaacaggctgtgcatttgtgttactttgcaggtgtccatacccgataaatccaattctgacaggctgctgcacccggaaaacatatactgcatgctctccaaatcagccgtgtcaaagctggtcagatccaatgcctccagcttctcacaatcgctgaacatgccgaacatattctttacattcgatgtctcaaacccacttaaatccagttcagtaagactggaacagcctttgaacatgttatacattcgttccacattcgtggtatgaaagccgctgaggtcgattctttcaagtttggtacagttattgaacatatccaccatactttccactgcaaaggtttttaatccgctcagattcaattctgtaagaccgatgcatccttcaaacatggaacccatgtcttccacctttgatgtatcaaaatgattcacacctaaggattccagcaatgcacattccttaaacatcgaggacatatttttcacagcagaagtctgaaagcctgatacatccagtgatttcaggctggaacacttttcaaacatagaattcatatcttccactttactggtatccgggctgcccatttccagtactgccaatgattcacaccctttcaacataccggacatatcctccaccattgcagtattaaaccctgaaatgttcaattctgccaaacctgcacaggaagcaaacatgtccgacatgtctgttacagctgctgtatcgaaattctccacattcaaggacatcaatccccggcatccataaaacatacttgacagatcctgtgcggttgatgtgtgaaatccagctaaatctaatgtctgtatggtattacatccataaaacattccgctcagatccgtcgccttatccgtgtcaaaaccacttacatccagttccttaagctgtttacagttgccgaacatctggctcatatccaccgtatttgcagtctcaaatcctgacaaatccatttggaccagattcatgcagtcatagaacatactgctcatattcaccgtatccgaggtatcaaaattacctccgaatcgaatctcctccacattttcaaagcaggcaaaggtatattcacagtttgtattcgcctttactcccccatctgctgcgatatagagatgatacagacttccgtccttctccgtccatgcaagtacacttccgtcatggggtacagatacatcccaggcatcctctcccgctccttcccggctgtccagaaatgtgatcttgccaatctcatttcggttatacaatttatttccaaaaactgtggcagccgttccgttgtcactataccagttataccccgcaaaatcagtatccgccacatccataaggcttttgcttaggtggcggtttccggtaaacatgtaaaccataccggcaacaagtactacaaagcagacaagaactgctgcatattctttcataatctttctgcgcaggcgaacttcttctggcatgggcctgttatataatatggatttaaattcctccatactctgaggcctcttctccggattcactgacaatcccgccataaccgcccgaatttcgtaactttttaaatgaagcttcctggttttaagagaaaccagttcatccttttgggcccgctgcagagcatcctgaggcgcctctcctgtaagcacatcataaatcgttgcacataggccataaatatccgtccagggtcccattgcatgattggaggttccatactgttccagtggagcatatttttttgtaagtaaaatcatactttgctctcgatccattctggcaaccgagccaaagtcaatcaacctcgcacttccatcctcctgtaccagcaggtttgatggtgtgatatctctatgaagaattccctgtttatgtaaaacaatcagtgcgttgattggctccttcagcatttcaaacaattccgatggctttaccttttcttttcggacatattctcccagggtggttcccaaaatgtattccattacgatatatgcagtttcattttcctcaaaataatcctgcacagtaacaacccctggtaaattctttaccattcccagtactcgggcctcacggataaagtgctccattcccacaagatacagactacggttttgctccgatacctccaggtcatctgaataatccgtatttctgcctgcaaactcctgaggaaaatattctttgattgcaaccggtgtctgcagtacctcatcataggccgcataggtaatgccgaatccgccgattccgatcacgcttccaagctgatacctgtcatgcagcaatgtacccctggccagtgccggacttttgttttcttcttttctatggttatatccgcagtatggacacacctcttcctcctgaatcggccgcatacacctggaacataaatatactccgctaatatccattcatacccttcctttcagacaatgagaatcccttcgacagctgctataagagtatcttaacagtaatcggcctcaatttgtctacttagggtaaacgattgattttacaaaatacgtcagagttcccgcaatgatctattttagcggcacaagcctgggtaattcatactcttccaaaatcatatccatctcaccaagagacaaaccatttacaagtccgtaaataaccgccacatctcgtttggaatcgctggtcagggctgaccgtaatccacttttgagaagttgtgccgtttcctcataattaaactccaatacaaaagctattcgcaaaagcatatctctttccgcacgctgctttccattaataattttatatccggttgcacggttaaaaccagctaattctgacataacttccacagacatatttttttcacccaaacgtggaagaagtatatccggtacactagttgtctttttgggcgtcatcttcaaaagcttatcaatatcctccttttttgaatgatccaccatccacttggtatgtccaatgcgttcctcattatttgcaatgtcattgtttttattgtccacgatttccctcctattgcctataataggctctcggaatctctaagcaccaatctatgcggcttccaagaacccttttttataaattcctccacttttttcacagaatactaaagaagattttacaatcaactctgacgggattcccgtctgcccgcagggacataccatgcgcagggatggcacagaaaaagcaaaaggacggacaaaatttaaatgtccgaaaatctcctttgccggcgggaaaccagcgtatacctgtgaatcttcctgttcagatgcgaaatatggcaggacagtccaccttgttatgaaagataatccaaggctttttaatgatccgccgcgcagcagaaaagaatagaaagtggaatttaatgccaggacttcttcggagcgctgtaacaaacgccagaaaatagactataaattagaagacggcagataccgctcctccaagatgtggtactgccgcctgttcagcatcatgatgtgtcagcatcttgatgcatgggccttgccaaagacttcccgactaaaagacctctttgagcaagccgcttaactcaataagcaataccattgtaaaccatgtccggcgcagggtctagtcaattgcgtccttttttacaaaaacacacttcagctactccattctggataatatttacttttgaaggttcagctgaccgttgatcctggtcagtaggctcaggattccgagagcctattataaatgtatatttataaaatattaacctctatatggtgcaggttgctgcatatttccttgaaaagtctgttatccacacaagaaaacaccacctgaatcggatattcttcgtggacatccagccatcccttgactgtatctactgcaatctgggacgcctctctttttggatagcccaacttccccgtggaaatcataggaaatacgatactgtggatatcgttttcaaacgccagttccagcgaattcctgtaacagtcccggagcaatttatccgcattttccgtaccgtagaccggtcctacggtatggatgacatactgcgctttcaagcagcagccttttgtgagcttagcttccccgggacagcatccgcccagcccctggcactccttgcgcagttttggtcctgcggcccggtggatagctccgttcattccactgctgcccaacaggggctgttggcagcattcacgatacattcacagtcagattgagtaatatcactatcttcaacggacattctatgtatcggcccaaagattcgtttttctggaacacatttgtcatcaggcagcccgtgaatgcgcatttcttcccgaagctccatcaagagccgacctagatggttttacccttgccgctgtgcaggtctacccccaataaagatcacgccagtaattaccttccttcagaatctgttctcccgtgtccaaaagagctttgaccaaatccggacgttgtgtaaactttgcccacaataccgcacgcatggcatccagcttaatttcatcccagttttcccgtggcagaaggctgcgccccagcttttttgcttcagcagcgtctagctcagaaaattgttccctatcttccatgcgcaaacttttttgtgactgataggctgcctccgcattgtaatacgtgattccatccagtatgaacttagatggataaaagttgtttaaaaactcgtagattccagcaaaacggacacttgtttttttcataccagctttcatcctatctggtcgtcatcagaacgcccccactagaactaggtatttttagttaataaagcaggtttcagttaataaaacagaatattcccttgaacgattaagaattatcttagagtaattatagctctttattttgggaattacaaactttttatgcacaggttccttccctttttccataattatgactgtagtgccagggttgtttcacgaaagataattaaataagctgaagatatataaaaagctggaaaacttaaatttatacattctccccaaatttccagctttttcttttatgtagaggtataatagaatgatattggggtcaaaacaacaataagttttgcctccctgcctttatagcaccttgaaaaattcatattttgtagaggattgattttttaccgggatatgaacagatgtatcagtattgtatttatgccagtatcggattttcggcatagttacccaagccctttctaaaattgaagagcttcctgaaattcaatgctgctatcttacacccgaagaagaacttccctcgttgttttccacggggcatcttctccagatgatagttcctgcggatactcgatgggactgtttctactccattcctaacacgggcatagtccttaaagtcttcactgttcatgtcccgttggatcttcgcacgttcatgtgctgctttggatgttgttatctttgcaacttgtttgtagatcttcggtttacattgatcctgatacggacagcccgcacattggtcatgtaggaatgaaacggcacactgaccgctctgtttcatataggagcagctttttggctcatagcctgccgcacacttgagtacttttgtaccttcctcattgaattcgaaatcagcaaggatgtccggggcggttttccctgtcaggctggtggtgatcaatctcacattcttttcggctgcaggctgtatattttcggtcccgctgtatccgccatctgtaatcatgactgttttctgctcctgtacctccatttgtgccagatgctcctggatgaactggctgtcactgaggatattctgttcatattgatatccggtcacaacagagcgatttctccctacagtttcttcaaggtttggcacatatccccggtgctcctttcctgccttgctccggtatgtggcttccgggtcggaggggttctgcagcatgcctgagtccataccgccatcttctttcgtgcgaagccttcgaagcccgttttcaacaatggtctgttcgcagaggcatctcacaaacagttcgtactctgttgcatcacgatattccggcccgcatagcgcgagaagggcatcggcatcggttaaaagctgtttcatacggtcattggcatccgtacttcgttgatgatatatgacccggttataatcgttggggtccgcatagtgttccagagcatccggcaggatgggaccttccattttgtttaaataggatgcaagctttgaaatacatgtgtatatcagttccatccggctgagcctgcggatattcgactcgatcatcatgggatccatgcgccgcactttaccgctgatccccattaacttggcaatggaagagcttaagtcttttacacagtcatgataaaggtcctggttgtaaagagtttcatattcataacaacgctttcggaaacggctcagtgacttgtcactcaaaggctgctcttcaaaactggtggtatgcagcgcatactggagcctgaagtccagcataaggttttcgaccatctcatcatccgaataatcaaaaagttcctttatgatgagtgcaccaacgatcacattgacaggtgtattcggccttgatgccttaccgctgtataaagcagagaagcgtttttcatcaatagacggaaatatctcatcggcaaaaacttttgcccaggagttttccaaagctttttgttccctggcagtcaatccggaaaaactgtctgtgagtgatatctgctggtaagagttttctttgaacgacatagaaaataccttccttcgtatattatcttcatatttctattataccgcaaacggactctacaggctcgtatttctacaaaatatatgaatttttcaaggtgctatagcgggacttttgaccccaatatcataaaataagtataatgaattttttaacaagtgtaaaaagaaaaggggatattttgtgcatttgtacggggaccggcagaaacttcatgttaagctaagatgagatccgggaaaatatctttagaaacttcgtgaaacaaccctggcctgagtgcagaagcctattgacttttgtcttctacaagtgtagaatgtaattaactactacatttgtagaaagaggtggaccaatgaaaaaagaataccaaagacttccagattcggaattagacatcatgctggccctgtggcacgggaatccgcccatgaccagagcggaaattgagaccattgtcaatgaaaagaaagcccttgcccccaccaccattctgtccctgctcacccgcctggagaaaaaaaactttgttctggtgcagaagcaagggaaaatgaacctgtatactcctctgatctcccaggaagaataccagcataacgaaagcaccagcgtgcttgagaagctgtacggcaattctctgaagaactttatcgtctccctgtacaggggaaagaagctaaaagaagaagagattcaagaattaaacgacttcatccaagagttggaatccaaggaggactagcctatggaaaatctggccatacatattttaaaggtcaatgttttggccggggcagtgatcggccttgccttcctgctctcccgttttattaaagaacggtacagctcccggtggaaatacgtaatgtggctgctgatctccctgtttttattgtttcctgttaaacccaggcaggaaactacaataattcaagtggaggtgcaagaggatgccaaggtagaagcttccggtcaggattatgaaacagaagggcccattgtgatctcagacgaaaccgtgcctcccaccccatcccaggacagcggctttataaatctggacagcctgacccatatccttccactttcccggatttttggcctgtttcttgcactttgggcagttggagcctgtctccttcttcttgtacgggcagctctgtatcacaaatccatgaaacgcctcctgcgctggggatttcccgtgacagatgcaaaaaccctggacctttataaggaaatctgtaccttaaaaggaattggtccaaggcccagactgatggtccacagtggactaaaaggtcctcttctggccggacttatgaaaccctgcctctatctgcctgacaccgcctacagtatccaggagctgcgccttgtattgctccatgagctcacccattatacccacagagacctatggtataaggctttgctcatgcttgtgaccacggtgtactggttcaatcccttcctgtatcttatgacaagggaagcagaaaaggacgtggaatacctgtgcgacaccaccgtggtggcaggctgttccaaggatgaacgaatcgtctacaaccggcttttgctaaaaaccgccgcagaacaaagctccattcactatctgtccgccagcctcaatgacagctcggctgcctttaaagaaaggattttgtatatgatgaaagcaaaaaaattaaaaaagggaatcccgctgatccttttatgtacgctggtgctcacctgtacaaacctcctggtaggctgtacggtcagcatcaccactcccaaatttaaggggaagggcacacaggaaatcacaccgcctcccaaggaatctggagtacctctggcatccccttccgccacacctgtcccggaactcacacccacgcctgagccaacccccagtccgcagcccacagtcccgccgcctcccacctccacacccgtgccggaagaaattcctgtccagcaggctgagcccacaaaaacacccgcccaggaggcagctgtcccaagggccgttgacctgtacgccgtgaacttctttgactcctctattttccagtggagcaacagagaagactggtcccagcggtccaacacctacaacgagatccagattttcagcgtaactgatacctcctttgactttgccttctatcaagtgacccttgaccccaacacctgggagcaagtatcccgggaggtgatcttcctggaaaatacggcggtgtttaccggggatggcacacaggcgaccttctttggacatgactatacgctgcactttactttcccggacaatcacagtgccctccctgtagtcactgacatccaggtgaccggctatgaccccatggagggagccacctttgtgaacaacggacttccagggcatgaatttaactgatgatttctataataaatacagaaagtaggtgttaaacattttatgtaaacgttttctaatgccttttgtatttatatcacttcatggataaggcacaggatacaatattaaaaaagattgaccaagatcctgagtggtttatatccttattgaaggaggcaagggatgatctatccccagaatcctaccagaaatatttggatgcagccactactctttacgaaaatgatcaggatcaatacttacgcagagcgatagaggcaagttacgctaaattccacggaaataaaatgttccatggaaatacagaactttcgttagataaggttatcaatgtgattcgctattttgcttcttctacacagataacaaatctttataaggtaaaactagtaaaattattgtggtatgccgatgctctttcttataaaacaaagggatatgcaataaccggattggtatatcaagctctgcccatgggagcagtacctgtaggacataattcaattattaatttaagagatgtaccttgtgaagaagtagatatgggtgagacatatgcctatcattttgcattgaaggaggaagtctcatttccgtctctctcaaaaaagatataaatattttaaatatcgttattgaaaagctgggaaagatgcctaaaaatcaaattgttgaatttatgcataaagaacaagcgtatgtggagactgcatttagagatgtaattccatttaaatatattgagaatttacaaatttaacactcctaagatgcatggttaaagtagaccttttggcttttcagtggtaaaatatgcctaacaggtaaaaaataccacagggggcttctatgaaaaaaactgaagaaaaatctgcccacgccaggcgaaaatacagggtcgacgtgcaggtcttccttatgacagcagtaattgtcatagtttcctgcggacttacttttctggtaagctatcagtttacttatcagggaatgcttaagggacttgcaggcagggcaaaaagcatccacgactatgtggaagaattgatcgatattgaatccttccgggtgctgaacaacagggaggatgaggacgcgcttgtgtaccaggagacaaagagctttctggagcgtgtgcgggcagcgtcaggtgtccgttatctgtatacggcaaaggaaggggaggatggcagttttatttacctaattgacggcctgccctctgacagtgaggattttcggaatatcggggatttcattgaacctgagtgcataccggatatgcaaagggccatgtccggagaggccgtactgcccaaggacattaatcatgcaagctggggagaaatttttattgcttattatcctatccatcagggaacagaaactatgggggttttgggaattgagtttgatgcggccagccagtatgaaacctttcggaagatttccatcgccgctccagtgatcatctgcctcttttgtatgatcgctgcggtgatcgcggtaattttatttcggagaatttcaaatccggcttataaggatatggctaatacagacctgctcactggtctgaagaatagaaatgcctttgaggtggacctgaacaatctggagagctggagagggaaggagcggactgccttggtttccgtagacctggacggactgaaaaatattaatgacacccagggccattccgtgggagatgaatatatccgggaaggcagccaaattatgcaggagagctttggcagtttgggaaccttgtaccgggttggaggagatgagtttgccgtgatctgccatgatatagacaaggaattagtggcagaggcggtcagccgtgtggaaaaagcacaggcccccagtaccttgctgaacttacaggtgaagctgtcggcaggttatgcggtatttagccaggagcgggacaattccctggaggatacctaccgcagggcagatgcaaacatgtatgaaaagaaaaaggaaaaatatagggaaaaggaaagagctgttacaggtctctaaaaaggaggagtgccggactctcaaaggagcgcccggcagtatgaaatagaaaaagtttttaatctataaaataaaaagattagcgtcttcatttgattattactataaccaatatttgtgaggaaactgtgagtagattttgaaaaaattgtgaaggaagccttaactttcagcttccttcacaatttcttccaatacccgtataaggtcatggagattgttgatttgtacgtttcgttccaaaatagagtttttcaggtcaatagacagagattcaaatttttctctgactgcgggagcaatataagacatagaatcacctcgggaataggatgtgcagatggaacgaaaatatacggaaaaacctctgaacctctgaattttttttaaaaaatgaaattttgtattgaatttctactaatcagtgctataataagttcatagggaagtatagctcagccgggatgagcgttcgcctcacacgcgagaggtcaggggttcgatcccccttgcttccactcaaaaaacctttcaagctagaatgtacagcttgatgggttttttattttataataggaaatcacccaaactccaatcttgcagacttgcgtttgagtgatgagatgatagtcctgctgaaaagcgggcggattgatgccgccctgctttgcgaactggcggcgcacccggattttgtgaagctgctggccgatatacagatttatgtggaggatatcactgctacgtagatacagaacttgaacgcatgggtagacgtggcaagggctgacccggattgtacaaaaatcggaactggcgaaaagctatgtgccacaacggggaaaaaggaaatgacaagtacgccttaggcggataagacgcactcgacaaatcgacgtttgtgagggaggaaaagaaatgttaagcacaaaaacattatctatttttttagttggcatgattagtgttgttagcctgatagcgtgtcaaaatgccaatgctaatcaatcaaatgtatcagatactgaggaaacacaaaaaaccgttcttgaaatggaaatgaatgcaaactacagtccttcagatccgtttgagaatggacgcctattttgtgtgtctgaggatatagaaactttagacgtagaggtttattttcagatggatggcgaaagtggtattgtggaaataaaagacagaaatgcagacgaagttttatggagcaatacatgggatgaaaacgtcagtggtgataccgttaaagtttcgctcaataatctacaagaagaaaaagagtacgtcgtacggtttactggaactaaaataaaccatgctgttgtaaaggttacttttgaaagcgaatcggttcaagagaaatcaagaccttccaaataaacttccagtttatcgaactgtttacgtgcgcctgattaggtgaaaggcgtacttgcatagctggggaaatagcaaagacgagcgagccagtcaacggtcaagatgaacggcggacaagcacagtatgggattgtccgccttgtctaccctttcagcgggacggcaggcgacagtcaaggccggacgcaagcccgttcatttcagccttgacagttgcctgctgtcctgctacttttccgcgagcgtggccaaacttcgggacattttgtctacaagttagggcgcggacgagggacgtgggccaaagggtgcctcttttgttgtcacattcctcttgccgactgcccaatctgaatgttcctcaatacttccttattggatgtcggcctttgatgacgttcccttctttatttctgcttatatcaagccgctgttgcagtcttatagtccataataaagattttgctggatattttttctagctgttctatcacttcatcaattttttccagcacggatgtagaaaaatattcctctccacattgattgcacttcatgcatggaacattttcaatgattacatagcagtcttttagcttggaaaaatacgtggttacactttcctgcataattcctgatttgcaacttagacccatcatacctgtttctcctttctagtctttaaatcactttcccatttttccaggtcaggccaataagccgtaataattcgacttccggtcccttcatcactcatgacaatgtacattactttattgctctctgtcaattccatcactaaacaacttggaaaagggaaatcttcaggatattgctcaatgatttctccatttaatacagcatttcttatatccttctgccttataccacgctgtctacacctttcagaagaatgttgcgtcataaacactttatctttttgatagtattcctttaatatttccaaatcaatcattattgaaccgatacctcctcaccttaatgtaattatatgtcctgtcgataaggatttcaagcttttatagagtcgcttcggctttgtttctgcatcacttatcacctcccttaatcagcttgttatcatcaaaccatttgatactacctcctcaaaatttgataactggctgaaatattacgccacggctaattgtattgaccaccccgtttgttgacttagtgattatctgtacttcctgtatcagctctaggcaggtgcgaaatccgcttataaaagcatttttctcccgtgttactgcggcgttattgatttgcgactctatatagaaagcatctttgggtgatgatatgaaatgacgtataaccgcctgtactgggatattctttgatattcgctcagtgaaccaaggtcagcctcgagctgtttagcgtcaagtgtcctgcgctggcaggtgcttacctttaccgtaaaatcactgccagtgcaatttcacactttctttcagcttctttctttgttctcgctccctcgatatgtaaaggaaactgaactaaatatggttcctttttactcaaatcgtctttctagatatcgccctctgcatgttccatagtctctaccttcctctcttggggaccaaagtcccttatttatcgtttaaataaaatcgctgatactcatacccggcgcatcccacggattagatggaccgtaaggcttttcttcgcactcactagccatttcctgtctgagctgttccgcataaatctcattgcatgtatcccaccattccttgccttctgcttccaattgttcaggtgtctttgtgaggtctttcttaagccagtctatccactcttgtaagtcttcgtctgtcataagcccctcagctaaccactcatgtacttcctgtagctgtttttcttttgtgctgtgcttattcccagcttttctaagtagtaaaaccgcctttaagatatcgtttgctctcatatgtttaccgtcctttctgtttcttgcttttggattgctgtgttttgttgtttcgttttctatatcttgattacattataacgcacatatatagcaactttaagttgaaataaccgccaaaataacgcacatatatttgcgcatacttgtgcaatacgtataacgcacatattaaattgacgaaattacggacacatggtataattaaaaataggaggtgatggccgtgaatgaaaaggaattaaaaactacagaagcccaaagaaaggcaatacgtgaatatgaaaaaagaaattatagactcaatatagtttttccagcgggaacaaaagaaaggattgaaaatctgaatataaataaaaccccttcagcttttataagggacactgtgttatcaaagcttgatgaacttgaaaaaattctgaaataacgcacatatattccgggcattataacgcacatgtattataataaaaacagttaaagaagggcaagctactttaacaataaaggaggaagggatatgattcaagatatgggaatgacggataaacagtttaacgggttcgtaagattcttgcttgacgcattaaaggaagcaaaagaagaaaaagagccagaaaaaaaggatgagaagctaaataaggtaattgataacttgcagaaaactttagaagactaagtaaaacaaggacgggcttgccactgttcctctaggattattatagtaacgctagctatgtagaactctccattagtgttatgcggctttcggatataataatattgcacacgtaaatatatcataggaggtgcggaaatgccaaaatacgaaattattacatggtggagcaaggaagatgattgttatctggctgaggtaccagagcttcctggatgtatggcagatgggaaatcccggaacccaagggacggttgatgtatgcttaggattatcatttaaaaagaaggttgttttatgagcaaagatacgttgcatagtttaattgatttactacctgatgcagacgcagaaaccatttacagagtattgattagatttgtcccagaagatataccgttgccgaatgaagtggaagcaatcgagagaggacacagagaaaaggcatctggagaagtggaaaatttagaaaacattgactgggattaaaacaagtatactcgtatcagaacatgaggataaaattaacaaataatttgacaataaccataccgcccggaagagtgtaagcctattgatatcaaagtgcctacactcttttttgctggaggtatgtttatgaatagtgatatgaaattcattgccagttcccccgcagaaaagctgtgggtatgcagaggaaatttgtctccttttatcttgctctggatgattgttgtcctcttttacataggaatatcagtcatagtttaaaaatctgtttttcttaatcgaaagaatggatggtatcctttatatgtaccgcctgatgggatgcgagagattgcagggagaatccgtactaatctggtaaaatatggcgctgatagggcgtaccgtgtatggggctagaaaaaacttaaaaaataaacgtttttttctatgggtatagaatgtagtccatccacatactgtccggaaatttgagactagcaaaaaacatggcggttaagctgtaatgctcttccagcctggcaataataaaatgtcccctagatatcgaacctagaggacattttgtattttgggtttcttcaatcaatttgcataatttcaaagtagagttatttttacccaacgatagaagtcttctactatgtcgcttctctcattcccatttacagtatatgcgtaaatagacgaatatttggaaagatttttaggcaccttaacgtcaatgaattcacttgtctccatttttttcttaagcagcgtctgattatgtgttttcactactatcgtgctcccttttggcgcttttacccggataatatctggtgtggatattgaagcatccgctctgatctcaggtttaggcagttttttattcaatttctcaggagctattttattgaatgcaactactttcttagtaaccactttacttttgtttccggaaccccaggtgtaataaaactttaaaatagttcccggcttctgcttgggaatattgatatttataaagcctcttctggtacctgaagtatgcgttagtaattttgtagcaatatttttattatttactgtcacagaaagtttacatctatgtggcagtttacggtcgattgcgtaataccggataagaaatagccggagccaagaggccccggcaaggattatatctctgtgaaggtataacgtttgagtattccggaagaaactacttcgtatatgatatctccatttggattatcaatgcgtttaacttgagcgtttgccgggataaatctagacatataaccatcaatgttgtcagtctcaatctcgtcaacagaggtttgaggctttggggaacaggtgtcataatattccaggtataattcgtattctttcatggcatcctccttaaggtgactttgaatattttactcttacgaatcaattatatcacgtggaatatttaatttctaatcataatattttcttcaagctggcctttgagacgccgcttttcccggcggaagcgttccagtccgtcaatctcatcgtctgatttgtgccgcgttcgtctgtggggcagcactttcttctcatggggatcatactgtaagcttcagtatccgcctgctccctgtataggtgacccagagatacaagccatacactgccacaaccactcctcctgtaaatactccggtctgtatcaccggccatagaccgatctcatccgcctgggcaaacactcccgcaacgataaatactgcatttaggactgccagcacaaaaggaatcccgaaatatgcaaaaagctgtacaagaagtgcttccttcctgtcctggtcacttgccccaagcttgtgaagcagaccgtatccatagctattgtctgctgcctgggataactgctgcagtgccagaaccgcaccggccacgatcaaaaaggtgatgccaagataaatcccaatataggtcactgtcagaatattggacataatctctatctgaatatccttatgggtgtaaaatacaattcgctccggattgcgcagggtatctatcgtgagctcttcataggagtctgcgttttggaaactgccattacatactgccaatgtgagcgtcagtcccttggtaagctcttgtggaacgatcagggttccactgtcctcgaagccattgctgtttttgtaggtcccataatacaggccattttccgctggcttgagcatttttccatttatatccagtgtacggccgcttttcataaactccttcagtgcattccctttttcttccacattatagttgaccgcatattcattgtcgcccagtttcaccggataccttcctttcagggccattacccgattataatcctgcactccaagaatatatagtttatactgttttgccttactgctgtcctcaaataaatcctgggtgattccatctgctgtatagaacctaagctctgcagaatccttcaaatagtcagacagaaccaatcccttctgggccagtgcctgctccacggtcctatcattcagactttccagctcctcccgcatctgaaagctcacatcataaggggcgatggcatctgcgtcactgacaaaggttttccctgtgccaagaccgatcgtcataactgctatggccagacaaatgagtatactcacaacacctatggatatgccggcacttttcagacggctgccaagctgattcacagcaaaaaggtgaagcctgctgtaatagtatttttttctccatttacacaccttcactaagattgcagaaacagataaacacacaagaatactgcctgcggccacaagaaggattccttccagaagtccctgcaagaaatacttttttcctggtaatgcattcaccagatatccagtcaggatcagaatccagcccagaacaaaccataggatatcccttgctcttcctgtagataccgtttcatttttcttgcctgcgtacagcagatccaacagctccattttcctgatcactcttatattccaacggtatacaaagaaaaacaaaactccaaaaaataaaacagaagctgcaattgcctttacggaaagtacaaagcggtaattgcttagttctgccccaatgatcttagctgtcacaagggacagtccctgagacaaaagaactccggatataagccctgcagcaagggaaacccctccgatgatccctgtctctcttcccaaaagggcacggatatcttgaaactccattccaagtgtcatgtagacacccatctcctgctttctgcgtctcaacataaagtggttggcataaaccaccagaaaaccaatgatcagacacacaaggactgatatggctgccagcatacctgcagagaatgacagaaaattcagtctgtccggcagatgaaaagcgctgaactgggcttctattgaattaaatgtataaaaaagtgccacagaaaaagcaagtgttataaaataaatcagataatcccttcggctcttccggacatttctcctggcaagccggtgaaacaactcctttgatatagtaggatttcctttcttcttaatctgcatggctcatccctccgcccagataggaaaccacctgcataatctcatcaaagaactgttttctcgaaggattttcccgcacaagttcatggaatagttttccatccttaataaacaggattcttttacaatggcttgcggtaaatgcatcatgggtgaccatgagtatagtagcattcttctcctgattcatcatccggaaactttccagaagcatgccggccgacttggaatccagcgcccctgtgggctcgtccgcaagtatcaaggagggttttgtcacgatggctctggcacatgccactcgctgccgttgacctcctgacatttcatatggatatttttcaagaatttccatgatattcagatcttttgccgcagcttgtacttttaaatccacaccctctggggcctctcctttcactgccagcgccagcgcgatattttccctggcagtcaaagtatccagaagattaaaatcctgaaatataaatcccagctgttctcttcggaattgggcaagactttgtctgtccagcttggtgatatccgtatcccccaccaagatctcaccggacgttgcactgtctattgtagaaatacagttcaaaagtgtggtctttccacttccagaggcccccataatcccaatatattcaccgctgtccacctgaaagctgatatgatccaccgcttttgtaatgcttcctttattttcataattttttaccagctcaataacctttaaaattgtactcatctctatgaacctccttgggttagtttacacaatttggcattcccctatacaggcaattcaagatgagaccgtcttttattttggctgtcctgttcacggaaaaaaacaggaccctatgcacacacttttttgaatatgtcataaactaaacatgtaaacagaagtttttcaagaaaggaatctgatccatggaaaaatatccgatgaatcgtccgggcggccgcaacatgtacggaaactgcccctgcccgggagaaatgaatatgcctcccaagtgcaggtccatgtctccaagaaactgccaaagggactccatctatgaacatgttgaccatctccctctggctatggcctacgttccttaccagaattttaccaatacctttgacctttgctatgccttaaaggcaggaactattttccctgacctgtgcaagccattctgcggaaaaggaggtctttgccgatgatgaacacaaattccaactgctcttccaccagagagcagcttttaagaaagattgacgaagtgagctttgcggtagacgacattttactgtttctggacacccatccccaagatgaggaggccctggcctacttctacaaaatggaagcagaaagaaaagctgccatgaaaaaatatgctgataattttggacctctcaccatcgacactgctgacgacaccgcttccacatcctggaagtggattgagcagccgtttccctgggagtaggaaggaggtaggaaatagaatatgtggaattatgaaaaaaggcttcaatatccaattaatatcaaaaccccaaatgcaaaaatcgcaaagtacattatgagccaatacggtggaccagacggtgagatcagcgcctccatgcgctacctgtcccagcgtttttccatgccggaccgaattgcggcagggacactttctgatatcggtgtatcgttcatgaagcgctcttttcatctcaataaccaggtaaatcccctctcaccccagctctcttcgcgcttgtcttagcctgtttaaggcctgttccttcttctgtggatacacatgcccaagaatatgatgctcataatccacaccttccagaaacttgataagttcttctaaacgtctggcatcatattttgcgtcattgtcgtaataatcttcacagtccgcatcccccacaaccaatgccctgtcctgaggaatataaataaacaaggaatctctggaatgggtagagtctctggggatcaaatgtagcttcacatctcccaaatccagaacctctggcctgggaacctcacgttttgccggtatcacttgtatttcctccagattttcatattcctccacaatacagttattgcaaaaagcaatatcctcccctgcctcttctctttccttcattttttccggtgtccacacccaggttccaacttccctcagcttttcattggtaagcacagatgccatggtaattccggctgctgcgtgcatgccgaaggtatggtcccagtgccagtgagtgataatggtatattcaggaagaggcagtccccacttttccagctccctgtaaaacaacgcaacatgttcccgggaatttcctgcgtctatggccacaccaaaatccctgcccttcacataatataaaaacggcctgtccgtacgctcttctcccggcataagatagatatgttccgtgaatttctctaatttcatttgtgttctccctttccgtggtccgatccatgatatatgaccaattttttcatttttcactccaatactttgccgcatcgaaacggcctttcttcttatattatagcttaatccccagttcttaacaacaaaaaaacagacaatcacctgactgcctgcttttacgttgcatgacctgcatctgaaaccgggaattccatacttacaatttccgtggtatagctttcctttcttccataagaccgatagccgatctccacgggaaaaggtatacacttcagaaagatctccagcgtatgatcgttatttataacaactttatccaccacctccctgtacacccattcgttgttgagttcgcagcttattatcctgtccagttcccctatgtattgttccaaagaatccagctgactgttctgaatttcctcctgcattttatcctgttcctgccttttctgcagtgcaagtattctttcatcataccactgcttttgccggacaagctcctcctgggttatcacaccatcgatcatcaagtccactgcccttgattttttttcctgcagctcctgtagttcttgttccagggttccgctattacctttgaccccgaaattcttctgaatactccgaatttcatcccgaatttcctgcttcaccttctcctgattgacctgaatatgggataccacaaatctcagacacgtaagaagcgtatgttcattgatatgggcattgctgcagcctacaatctccccttcttcatcctgtttacgccctccctcctttgccgctctcccacacctgaacgcccggtagatgcttccgtcctttcttgtgtgggtccttcccacaaaacgggcgccgcattccccacaatacagcctgccgctgtaccagtagcggttattgtgctttgcgctctgcttcccgccaggcgcacgacgcttcaattcctgctgggtacgctcccacagattccggtcaataatggcttcatgatggtctgccagatacaccatctcctcctcaccacgattgtatttttttgcatgagtaagatagtcgggagtaaacgtctttttctggcaaagatcacccacatatttttcattgcgcagcacctttaaaagcatggtgttagaccagcgtttccccctttggggtttcatcccttcctcaaggagttctctggcgatcacacacgttccttttccttcattggtatacttgtgaaatatggccctcacgatcacagcctcgtccgggttgacgtacatttttccaccggatacccagtaacccagcatattccggccgaataccactccctgctccattctgcgcttctgtccccagcgtacccgctcagaggttttgcggctttcctcctgggcaatactggccatgatcgtcaggcgcagctcaccatcactgtcccgtgtatcaatgttgtcaatggtaaaaataactcccactcccgcagccttaagcttccgtgtaaatgccagcgtatccactgtattcctggcaaacctggaaacctccttggtaaggatcagatccacccgtcccttcaaagcatcctcaaccatatcaagaaagccctgacggcgtgtggtctgtgtaccgcttatgccctcatcataatatactttataaagcttccagccagcatggtgagagatgaattcgtcaaaatacgacctctggctggccaaagaattggcctggtcctccttatccgtggagacacggcagtaggcagctacattaagttcttctcccatcaaattcctccctctcagtataccgccggcttattaccggcggtatttgtctcacttataaattaagattaccttcgtccgtccctgacaaactactggttgagcaagtcattgagctgttcatccgtgagcagctgacggttatacaaatttatgtacacagcgtgttttaaagctttttcaaattttttcctattctcttcagtcaaacaaatcgcatttcccactgttttttcctcctgtttggttaaaaaatgcctgtgttccacatctcatgccccagaatattcattattaataaaatatgcaagtggaacacaggcgtactatgtcctataaaattcgctcttgcatttatccggcaagagtctctcgcatttccaggggcatgtgaatatatacctgccgcatcattgtgacctcctcctatacggtaattaattatttattttacttcactgtctcctgcctcttcatagcagggcacacgcacgattattttctgcaagctggttcttccagctagatttagatacccactaacaatgcaggttccctgtcttaaatgggaaatagccttcagccagcttctccagccagttgggtctaggtactgggcaatcacttttgcttcacgttcaggcggaccaaaaatgacctgcaccccgctttgcatcaggcttgtgaccacacgattagggaaattgtgactgacaaactgtgttgacaaaatcatgttgatgccaaactttctcccttctgataagattttttctgcaattgaacccttctgccagttgaggctttggcattcatccaaaaccaacgcaatttcgtttcgttcatgcttctgcgaactcgtctgctgaaaccagattttccataaataagcttcaactaaatttgaattcactccgatgcattcaggcgtaaacgtaaggactgttaccccttcccttctgtcctccactaccggtttatcataaaatgcggtgacaatctcgaaaaaacgagtagcaagtgcttttccttctgaaccgcatcgtgtatccaaaataaacaccagaagtgcccagtcacatttggcgataccgtcttcttctagcaaataccggaagtacgggctgttggtttcgatttcctttattttggccatttgtaaaggcttttccatctcaaacagtgcggccaaaagcgtagctttttgcgatggccccagctttgcttgcatatattgcagacttacggcctggtggtttactgttgaaattaactgcgcgtttgatccaggatagtttccaggatagttttgtgcgggctgtgcctgcagtttaaaaagaaattgaacagcgccgggatacttattcttgacgagtttggctatgtgccatatgacagaaccgggtcacaactgctctttgattatctctccgaaatacatgagcagaaatccgtgatactgaataccaatctggagttctcacagtgggtcaatgtcctgtatgaccagcgaatgacgacggcactcattggacggctgacgcatcatgtggagttgatccttttccctggtgtgaataaccggctgcgagagtccagtatcaaccagtcaattccaagaatcaacaggcgggaggcagaaaacaatggcgaagcacaataaagttatcaaagagcagactaaaatctatcaagaccttctggaacgatatgaggaaatgagcgatcatctctccggtctgatagaggatcacaaccgcacagaagtagatttacggtatctactggaattcgtccattatagaaaacttgaggatgatttccggtatttcaggaagcatgcgtatgaggaatacgaagaggatatgccttttccttatctcacgctgtaacaattaaataatgatgtctgcaatgcctattcgctgacttcaatgcgggtcagcagaggctttgcaactttcgccaatttggagatgcaacaatcgccaaaaatgttttgcaactttctccaaaaagtgcttgcaaaaaacaaaaggagcgcttcagaaaatccaaacaaggggtttttgcgccctaaaataagagtcataaaaagaaagagacggttccctagagcttccgggctttgaaaaagcccgaatactatgggattgtctctttcttgcgtgtcagggggcaaaaatcgatattaaccgacagccccttctgcgtcaattttattttttctctatcatataagactgcaaactcttttggcagccgttcttttcgtaaaatgcttccattcccggctgtgagccaaaatacagcatagtaggtgtgttctcctcggcaagttggataagtcggcttccaactcctttcttctgataatctggaatcacaagcaactctgtaatggtaccaaaaaagtaaccagcaaagaaaacgaaaccgaccacagccccttaaacgaagtatccctttctagcttcgccaaaaaaccgtccacatacatttccgcctgcctattctccaacgtctccgtatcaaaaaagtccaccagaattttttccagcttagaataccccgtaagccttttcaaccatgtcggactaaccaaaaaggatacagcaatagacacaaccccggcgcgcaccacatccctctgcgtagtccccgcctccgtctccccgccggaatccgcctccaccgaagaaagagcgaaatcataagaaaccggcaggggaagggcaacgccatcaaaaaccagatattgcacaaacgccataattacctcccgccacttcgcaaattcatcctattttgtgcattgacaatcacctcatccaacagtgcgccgccaagatacaccggaatcacaatatccccgccaggaagccaccgcactttgaatcgcgccccaaaccgaagtaattaccgcatgaatcccatttacaaccgtagtaatcaccgtccgaatggaattccaagcccccgtaagaaaagtagaaatagccgtaaccaccgtagtaatcaccgtttgaatggcgctccaaaccgcagtaattaccgacaaaattccattgacaaccacagtaaccgccgacaaaatcccattccagaccgtactaaccaccgtatgaattgccgtaagcacggtactgatcaccgtacaaattgaattccatgccgcagtaagaaaatcagaaatagccgtgactaccaaagtcacaacatttttcattccatcccacagcccggtaaaaaaagcggccagagaattccagaccgtttgagccacagacacactcccattccaagccgccgcgaaaaaatccttcaaaccattccagacagcaaccgccgccgctttgacattttcccacagcccaatccaaaattcccgaaacccctcacaatgcgtccaaagataaatgaaagccgccaccagcgctgcaatcgccgcaataatcaaaacaatcggattcgcaagcatggtaacattcaaagcagcaaaagccgttttcaccatattgatcaccccggcaatcttaggcacaatcgacataatcgtaccaaccgccgaaatcaccttacctacaacaatcagcaccggcccaagagccgccgccagcagggccaccgtaaccacaacccttttcgtcccctcatccatgccattcagccaatccacaaactgctgaatccagccaacaatcgcacggatagcaggcattaacagctccccaaaagaaatcgccaattcctcaagctgcgacttcaaaatcgtaagctgccccgccagattatcctgcatagtagccgccatttcctccgacttcccatcacaattcgcaatcgcggagctaagcttattaatatccccctcaccggcgttcatcagagccagaaaaccgctcatggcatttttacccacaagagactcagccgcagccgcctgctccgactccgacaaaccagaaaaggctaaccggcaatccgccagaatatccgacaaatccctcatgctcccatccgcattcgaggtagccaccgtaacctccccaatactatccccgcagattttcacctccccggaaaggttcgtcataatcgttcgcagagaagtccccgcctgcgtagacttaattcccgcattcgccatcagcccgatagcctccgcagtatcctccgccgaaaaaccaagagaaccctcgataggagcacagtatttaaaggtttcacccatcatagacacattcgtattcgcattagaggaagccgccgccaaaatatccgcaaaatgtcccgaatccgaggcagacaacccaaaagccgtaagcgcgtccgtaacaatatccgaggtagtagccagatcctcccccgaggccgccgccaaattcataatcccctcaatacccgaaagcatatccccggttttccagccagccattgccatataattcatggcctcagccgcctccgaagcagaaaactttgtattcgcccccatttcacgggccttctccctcaaagcctccaaatcgctcccagtagcgccggacaccgccgccacacggctcatagccgaatcaaaatccgcagccgttttcaccgcagccgcaccaagagccgtaaccgccccggtaacgggcaggaatttttgccccacagaagaaatattcccgcccagcgcctgcaatttatcccccgcaacgccgattttctgaacagccgtagccgacgaatttgcctgctcctccaaccgccgcagctcattttccgtctcaataatttccctttgtaaggcatcatattgagcctgagaaatcgtcccattggcaagcgccgaattcgcctgctcctgagcggttttcaaagtttccagcttccccctcgtatcctcaaccgcctgtcccagcagcctatgcctttgcaccagcaaatccgtattccccggatcaagcttcaacaatttatccacatcccgaagctgcgcctgggtattccgaatttcagaattcacccccttcaaggcagtttggagcttcgtagtatccccgccaatttccaccgtaatgcccttaatcctattcgccatgagacgcacctccctccgaaaaataggcatgaaaaaagcagcgtcttcaaataaagaagatactgctcaaaatttttacaaacatttccatataaatttatgtctatcgtattacaacagcttgtaatacgcatacaataatgatataataaagacaaatagaagacagaaaggagagaatttcatggcacaatcaaccataaccgcacgagtagacgaaaaggacaaagccagctttgacgccttttgctccaatgtcggcctaaacacctccacagccatcaatctatttgtgaaagcagttttacgcgaaaaccgaattccatttgaaatcacacaggccaccgatccatttttttcagaatccaacatggcctatgtaaaaaaatccgtccaggaactccgggaaggaaaaggaacggcgcacgaactgatcgaggtagaggatgagtgaaaaatctggtcagacgacgcctgggaagactatatttattggcagacccaggacaaaaaaacaatcaagcgcattaatcaactaataaaagacattgagcgcaacggctgcatggagggaatcggaaagcccgaacccctaaccggcgacctgcaaggcgaatacagccgccgcatcaacgataaagaccggctagtctaccatatggaaaatggccgcatctacatcgcgcattgcagaggacattacggagacaaataaccaagcagaatccccgcccatcaatttcccacaccccacagcaggagaattgaccgggcgggaatttcatgtttgcaattcggtcaacaggcaaaaagaaagcaccggctatccctaaaatagaagggttcaggaatttatactggctaaacacatcaaccgccttattggtaatcaccgtccccgtcagtaaaagccgaaacccagccttcgcccccaaccggtgcatggccttactcgctgagatattatgggttttaattttatgcccttcatccgcaacaatcagatcaggccgccatgcgagcaggtctttttccagccgccatgcgctctcataattcaccacaaccacctgcagagcgctccccgtcatatgccggagcgtatccagcttcttagcgctattgccggaaagaaccgccaggcaataagaaaaatccgcaaatttccggtattcctcctcccatacgccaagaatagaaagcggagccacaatcagcacccggcaaatccggccagcctgcaaaagcgcacccgtaacggcaatggtagtaagcgttttccctgtccctatctccataagaagcgcacagccagcactccggacaggaaattccccgcccccgccctcgggcaacagaccaaacattccacagacaaaattgaaagcctcaatctgatgcctgtaaggcgcagccttaatcggcatggacagaaccggcaaagtatccctatccgcactcatggccgtccacctccggctcctccagaaccgacagggccttcacgctgtctccggggacaatgaccgtaatccggcgcatattcccaaacagacaccgaagcacccgctcgcgcatagacaccgttttacaccggacaataccgaccgaatccggcacccgcccaagactgatttccaggttgtgtttcatttgcctttcacctctttccgagggaatatttttaaatccctcatagttaggccacgggaaaggcaaaaccgtaccccctaaatcaaaaactttttcagacgggcatatattttctgtaaacggttgcggatggccgcctccgtaactccctccgcacgggcaatatccaccacccggactttctcaaagaaaactttcagcaccaattcccgctgagccggagagagggattccatagcgcaatacagccggaaaatatcctcccggctttgtgcctcgctctccgtatccaccccggaggcaaatatttccccctcgtaatccataccatctaaggaaacatgacggcgagtttcccgatgatcgttgttatattcctgccgctcaaaatccaccaacagatcaccgaaatccctgtccacctcaatttcagaaacctccccggtaataaattcataccgtacttttaccttgccgttttctcctggaataccagcaggagacatctgccccttttcccattcctgctccgaacggataccaatttttcgctttgccatacagctttcctttctttaccttgcggtaaagcaagaaaaagctaacggccatttccataagcacaaaaaaagaccgcaaaaagctgtaattcaactttttacggtctttaaacttattttccacacatggggaatgccccggcggatgcattttatcattttcaatatgacgttttcttaaatacttttcattggtgactgtcttctcgtccatccgacaagatataattggatgtggcgcggggggcaggcatcgtgtctctccttcctggcagtaccgctcatattcatgatattttatagactaaagtgatttcgtcaaagcgagccgtttacaaacaccacccgttttccataaactaccatatataaaaagtattccccctttttattcatgtaacgcatacgaattttattcactaaaagaacgagaatgaggtgaagtgagtaaagtgattcccgttgtcctttccgtatatgaatgatataataggacaaacagataaatttgaatttgtagagataataagagaatggtatatctataaatgagtttagcggaggcaagaaaaaatggatataagtaactataaggcgtatatttcggaagaaaccatgatgggaccaaatagcgtaagggttttggcagagctatttgacaaatatcctttgctgcttgcatctaatgatctgattcttgatttgggatgcggaaccgggctgacgagtcttgtaattgccaaagagaccggagcaaaggtttacgcaaatgacctatgggtaagtgcagaggaaaatgggaaacgatttgcccaatggggtgttgataaacaggtaatacctatttgtgaagatgcgtgtaatcttcattttgaagaaaagcaattcaatgttctggtcagtatcgactcttatcattattttgcaggccacgagggattttttcaagaaaagattttaccttttatgaaagataatggagtggctttaatcggcattcctggtctgaaagataaatattcaggtcaggccgaagaactcctctctgattggcttggtaatgattcctatatgttcaaaagtccgaaactgtggaaagagcttatcggtcgcaacgatagaattgaatcggtaaagacgtgggaaatggattgttttggaaaagcatggagtgagtggcttggaactaataatgagtttgcccgcggagacaggcaacactatgaatcaatcattaagccgtatacctgctttgttggtatttatataaaactgaaataggtattgtaatgggaattgtgaatcccaggttatcgagctgaaaattttgaatttgaggtggtgtagaatgaaaactcctattctggaaacggatagacttatactaagaccattcaatgcagcagatgcacaagatgtttttgagtgttgggaaagtgatgccgatgttgcaaaatatatgttttggagtagccataatgatattgaaaaaacgaaggcgtggatttcctttgagctggaacaaaccaacaagaatgactggtatcgatttgcgattgtgttaaaagaaacccatgaactgataggaactggtcttatatattatgaagttgaagtttcttgttgggagattggatataatttaggaaagaagtattggggaaaaggatatgcaacggaagctatgaaggaaatcatcgggtttgccactcaagaactttgtcttagagaaatcttcggcagattcgcaaaagaaaatccgaattccggaaatgtaatgaaaaaacttgggtttaagtatgaaaaagatattgactatgaatgtaataatgagacagtacaccgtaaaggtatgcaatataggttatgtatctaaaatgctaaatcccagtttatcgaggagttaagcagagtaacatatcaaaatattatcatgaggtgctaaaatgaaaatagagattggaaaagattttccgaagtattttaaatcctcatatccagaggaatttgaattattttcacattttgaaacaacagcaggtataccagcagttctatttgcaatcactacatggaaagaaaatgggaagccaaatgtctgctttcattcatggagttgttttcatggtgataaaaccgctttctttgctgttatgggcggtttgtatcagcatacacatacttataccaatattcaaagagaaaaatgtttttgtatcaattttcttcctataagctattacgataaattgatagatacaattaatcacaacgattatgaggccgatgaatttgcagtaggaaattttacgatttctaatgcgaaaaccattcattcaccggtaattcaagaggcttttataaatatggagtgtactttgaaagaagtacaggatttaagcgaggcaggcattacggcgatggtgattgggcaagtgcagcatatttctgtggatgaaacttatgcccagggttacgagaagcggtatggcgaggacggatttatgatgctgctacctgcgccgcagaatcttgttaccggtgagccgtggcaatctgcgattgccactgtaaatattgaaaaatatgattgataagtttcaatttgcaattagatgctgtggtatcctcttctggaccagcacatatcatagtgtaacatccctgaattattttacttcctgtgacacaccctgcttcagaagcatagatccccaggacattattctcaacctttacgccagcttcctttcccaggcgttttatgtcacgggcataatttcgggcctgtgtgttcttcatgtaatcctgagcagcgtacacgatatccaggatctctgtctctgcttcgagattcacgtcgatcaatcccttaccaccaaggaaaatccggagggtatctttgcagctggtgtctgcctctggaaacagacgctgcaaaatacagttcatagcctttgcaaaccctgcctctgtgactgtaatattcatcacaaatactgcccggaatctgtagttttgtctgctccagctgtatgttttatatgtaaacgcaggctgaatatggtattgcccgcatcttttcttaaactcctcatatggaattgtcccgtcaaaatccagtacaagaaagtcctgttggataaaattttcctcttttctctcttcatttccaaacagtgccctggtaaaagcccggcctttattacctgcttcttctgcaaattcttgcagagtaagtgtgactctattcctgctgaccgcactgtttattctcatatattcaacctgtttttcaggttttttccttaatctttttaagtccatattgatattatatgttttcatatacaaatcccctttaaaaactcttgaagaaggctgattccgtaatttgagctatggtcttgtccaagacggaagatattgttaaagattgtgttttatatattatatatgaaacacatttttatacttccatccttcttggccaggcacctacagtcctcagtttccccggaataaacctaaccagctttaaaaatcatttttaatccttatctgtatgattaattacctgtttacacttaattttttttaaaaacctagataaatttcaaatacagaatgaacagataattaagtaaaaatactgttaagggggattcaatcatgacagatgtaaatcatgaaattccaagcaattataattatgataatgaagcattaattatcctaagtgttccagaagtggcagaatatttgaatataggcagaaaccgggtctatgagctgctaaacaaaggaatcatcaagggattccgcataggctgtacctggaggattactatgtctgcggtaaatgcttatataaaagaggcttcgtgcttataaacacgcatccatacgcagcttgctgcaatcagataccaaacacaaaaaaataagggccaggaatcctatcaccgtttcctgacccttatgctactaacataatcacatgatcgcaacgcttcccaagctccgtcccttgccttttatcttgatgagcacacagatacctctgttgagtctgatatctcaattatctgtgatagaaacaaaccgaatggcaaggactacaaagggacacctgatcacagactgcttttcgcatcatgcattcagttcaaaattctcttggggaaccactcccgcagccttaagtaagcccatttcaacttcccatcccctcactgagaaggggcttgatctcttcgtccgcccttctgacaaattactggtttagcaagtcattgagctgttcatccgtgagcagttgacggttatacagccgtatgtacactgcgtgcttaagggctttttcgaaatttttgaggttttcctctggcaaacaaattttctcatccatgatattttcctctaattttgttaaagcccgcttatttcccacatcccacgcctctgaatattcatcactttaagcatatgccaacagtgcgtaaacgtaccttgtcctgggaaatccatttttacgcaagtgacgcacctaatagttgcataataggaacgtaagagtcgtttgtccttccagtacatatcctgtataattgatttaacggaggtaataatatggaattcagagaaaagctgcaaatattaaggaccaatcggaagctgtcacaagaagaattagcagaacaattaaatatatcacgacagtctgtaacaaaatgggaaaacggacaatcttttccagatattcagaatttgatacagcttagtgaaatattcaagatctccattgaccggcttgtaaagagtaatgacacctgtaacatttgtatttttgaccagcaccagtattccaaacaggatatccgtatgtttttggtcagagctaaaaacagcacttatattacaggaaataatcaagttcttccttccaagccaagttcttatgattatcattattcagagggagattatacctatatggatacttatataggcaatgaacactttgcgggcgaagaggctgtttggataaaagatattcctgtctatgctatgaattattatggaaaaatccttaattcaaacttcaactctaattttttgaaagaagctctttcacttgtaactcttgaaaaaccctaccgtgggatagaattctatcaaaatggagattactcttatcattgtgaggtaaatggggattttgactgttttcatggagaagaaaaaatttactgcaaacaagaaaaagtgtatatgtgtatgtttcatggaggcagtatatcttgaacatcatagaaaaagaaattacggcaaaaagttatcttactaaatcaaatctccctgccagtgattatgttataaatccctatgtaggctgccctcacgcctgccagtattgctatgcacggtttatgaaaagatttacaggccatacagaaaattggggggagtttatcgacatcaagcgatgtaataagcccattcaaacgaaaagactttatcaaaaatcggtttttatttcctctgtgacagattgctataatccatacgaagaaaaataccagatcacaagaaatattttagaacagctcaaagaagcagactgttctatcactctttctacaaagtcggatttagttttaaaggatatagatatattaaagcagttaaaaaatttaacagttgctatgtctataaacactttagatgaaaactttagacaggacatggatcatgccagctgcatatcaaaaagaattgccgcattaaaggagttacattcaaatggcattcgcaccgttttgttcatgtcccctatatttccatatttaacaaatttcgaggaactcattaaagaaacatctgattttgtatatgaatattggtttgaaaacttaaacctacgtggagattataagcataagattttaaattatattacggaaaaacatcctcaatatagcgatgcatataaacgtatctacacccaaggggatataaattattggcggcatctctcaaatgacatagatacctattgtcaaaacaataaaattaattacaagaattatttttatcaccagctgcttgttgctgataagaagaaaggcatgaaaaataaatagcaaaatcagccagggaagcgcgatccgtcttccctggcttcctgactgataggacagcgtatccattgggtgacagttcttacacctgctttttaccgcaatacacagtgatcgcctgcttgacaaagtcagcagttccctctccgcctgcttgatcaatgttgttcttgaagcgttcatcgcatacatacatttcacccaatccacgaaggatctcatttgtacatacatagtagttatcagttataaatttctgtaatgcagagattttcttttgtacttcatgggcatcaggatttaaatgttttaattcccctaattcagaaaacattgtcattagctcgtctgcaatcctgctgtaactgtctttatttccagcaatatccttttgtttgtactcttgataggcttttgtattgccccattttgctttgacttccgcctcatacttttcaatttcactcttgtcgaaaatattaaaattcattgttgttactcctttgttttgaagttcacgggtaaaggcaatcagttcccctatatgtttgtattgcaattctagcaacttcatttgctgagcaattacttctgattggttaaaatcaggactgtcaagaattactttgatttcttttaagggaaactctaattcacgaaacaataaaatcgcttgcaagcggctaagtgctgcatcgtcatacattcgatagcctgcttgggttactttcgaaggttttaaaagtccaattttatcataataatgaagtgtgcggggggtgataccagtcaattgagcaacttcatggacagacataggttttttagtcattccaaaagtcctccgcagcatctaaaatttcttctgcaggtaaaagtgtggcttgaatcacgcttttaccagtttttttcaagtaatgtcttactaaatgataaccacaggcatatccagcgcaataaggtagacctacttgcggaaaattttgtaatttggccaattcatcaccataaagataagcattgagattctcaagtccttgaacatttaatccgtcccgaacaataggtttgatatgttcgtccaaagttgtcatatccgtttttgtcacccaaggacctgccatatcttcgccatataaagaagttgcaaaattttctgccaacccttcgctgatcatcatctccccaagggtgatgtcatttttccattgaataaactgaaaacggatattgtgatttgtttcgtgtgccaaagctgcgggaagatgttctaatgtatatttgtttggaagcagccaggaaaaaatatatcccggtataccaccgtctccgcaatagccctcatttaacataacataagggctttccgaatttgccagcaatatagtaaacagatactcctgaacaggcaaatcaattccctgctctataaagcagtttaacgacttcctaattgccatttcacatttttcccaaagtttgtcatctgaaatcagctgaatattttgtttttgtgtttcgtctactttagttggtgcaaggtgcccaagcattccgctggccataataacatcatagccattaggcgttttcgcgttcatgggaatattgtaacaagcccattttctttcgaacggcatcatcagttcataccgataaatgtcattctttttatccagaggtgcacccataatttttgaataaacactgtctgaacgtacagcagatactttcatatcttttgcccctttcctgttttcctatattataaactatgacgtaacgtcaaagtcaagaggtaatcccacaaataaaaaaatcagccgttacgttataggaagtatccgtcctgaaaaaatattttgttcagtccaatgataaatttccgtcccataattccaaaatgtggaaggatcggatggtgctcagcggtaatatctcgttgttatcagccagctctttatttatacaataaaacaggacattaccattgatgcccgtgataatgtcctgttccttatggctgccgctttcctggcagtcctctttttttctttactttattctgatctttgtcagcgctgactgctgggaccatcttccaaagatcttcagcttctcttcattggtgatgtaagcacgcaccccgaaataataggttccctttgccagattggtgaaggtcactgtggtgctgtgataattcttcttcaggttcttcccgtaattcacagggcgcagctcccggtcaatgacacgcagggcccttcccagcatacagtcaaagccctctgctctggctcccttggtgaaccggatggtcacctggttccctttcaccttcacggactttatggcgctggcattgggggtgtcatggggcacctccagggttccaaggcttccccactggctgcagtgcttccgcccgtcttcatctctgaaccaggaacggcagtagccatagtaagatccctttcttacaaaatagaaggaggtaatggcatctggttcattcaaattggtcttaaagggtgcttccaagtccgggagctggctgctcttgctgagatagaagtcatatccctgggctccctgggcctggcccttcagcttcatgaacaccttattgcgctcataccacaggctggtatcctctgccgcctccggggttccagggcggaccaggttcccctggccgtcatagacgctgccgtccggataagtcagggctcccgtgggatccaccttcaccccttgggggacggtcacatcgggggttccgggacggtggatgacgcttccctcctgggtctctcctcctgctgtctctctgtcgtataatggccgatccccgctattgcctggtgtgaggatgatgtcatcctccgggctgtctttatcttctcccgggaggataagggttccgtcctccttgatctttacgccgttgatatccgtcacggtgccctctttgtctatggaaggcttctccccgttctccccgggctccagcctggtctggtccggcaggaagatggtgccgtccggctggaccaccgttcccccaggtgtctctatgcttccgtctggctgccacttggagccctccggatagttgtccgggattggcgggatgggagtcacagacggcacgggcggctcccaggggctgctgtgcacaggtgtggcggtaacggtgtcggaatctgtacggccaatagcatttatggccgtcagtgtaaagctgtatgttgtgccgttggccaggcccggcaccctatgctgcttggcgtccgggctgatggggaagggagagcctgtgatctctgtgcccccctgttttaccgtcagggaatagcctgtgatgggggagccattgtcaaagggcttcttccaggtgaccgttaccgcaccgtcccccgggctggccttcagctctggtgcttccggcgctgtggcaggtatgtttattacattggaggacagttttccagtaaagctttcgctggattccttcgcagtgatgaccactttcagggtctttcccaggtcctcccgggcgatcatatacgtcaggccctttgctccctcgatgggttggttgtcccggtaccacgtgatcgtgtaatctttctcggtgatctcggtattggccggtttggagaaagtcaggatactgcccttgtccgtccctcccgtgaggatgatggacccggtcaacggctctttggctatctccagcctattgctttccagggtgccggtgacatttccggtgaacttgacaatgcagtagatctctcctcccctgtcattgccgttcagagtataactgaaccctgtacctagatcgcttgtttccccgtccacggttttcttccactgatagcttttcttcccgcctgaaggcgtaacaccggaaatatttaccttgactgtatcgccattgtccagtttattgttgttgttttcatcggtgctttccagggtaacagagcctgctgctttcgccgcctgaatggtaaaactcttcgtactctctgacggcagcgtgtaattctcagcgtccttacctgtcagatcaacggcttgtgctgtatagctgcctgcatcagcctgccctcccttgacggtaacgactacgtcatcgccgtccaccttgttggaaacaactgcggcgggagcttgtttctggccgttataggtaaagatgtccttgtcccaggtaaggacggctggccgctttgccacggacagtctgccagcgcacacctccacgttctgataagcatcgccgttctgcgcagtaaaggtaacctgataactgtgattcccggcagaaggtatcccgatgctgtcccagtccttattatctacagccagggcaaactcccctgccaccttcttcccttccagcatagcggacaatttggaggcatcccaggccaggatcctttcccaagtttcaccatagaccggggattcttctatcttcagtgcatcgtctatgcctgtgaactccagatccacaacagtcaggagaagattaccggcgatgtttccagtgtaccgtccgcttccggtaaaggtatatggcacttctgttcgttcgcccttcggcagcttcttcagctcctccactacgtcattatagtatgatttgccattataactataggcaaccgtcccggtcaccggttcaccgtccacatcggtaaaggaaggctctgtaaaggctgcagttcccctggcgatgttctgcgtgaagttctgtttccggccagtcaggtccttggctgccagattgatatcaactgtgtctgtgatctccctaagattcttcccgccgccgtatttcacaatcagggtattctgccctatcacaaggggtgtaccgctgccagccttataacggaggatgcactcttgtccctccgcagcatccactggatcggtgagctgcgtatttcccaggaacagcgccgccttatcctgaaccggagctgacctgcgggacgtggctgcatttcctgctttgggcgtaaattttaccgtgatggtatcgccgtaggagaattcacttgtctcactctcgcctttataagtcttcaggccatccagggcagtaaccgacttttcaatagtcagcctgacagtctttgaggcttccttataattaccgcccgcctctacggccacctgataatagtacgtccctgcatttaccggagcgccgcccttggtggcagcaccactgtcctcagacgtggtctgcatggtgcactcctcgtctgtatagtagatcctggtggctttattttccagttcctctccgtccacactgttgatcttgtctttgatctcctttgcactgccgtcataagcagccgtctcatcccccatgatgatggctggctctgcctgtgtcagcgtgaggaaggcggatcctttgctggccagaaggttcccgccgccgctaaaatccaccgtgataggaaactccctgctggtgttcccgttcaagttccagtctgtgccgctggttttgatctcatagtctgtggtcactgtaccatcttcgttgtgtgttacgctcactgaggcttcgttcagcttcttcccgttttctttgtcccccagccagaaatccgcggttcctcccgtgccggtgctggaacttcctgagatggcgtctttctgctttttctgtaccgtagctttgatctgtatggtatcaccatatgccgcattttctcccaccggattattgcctttccaaagcgtcacatccagttgggaggcccagttgatcatcccgctcccggacactgttccatttaaagtcccatagcaattgatcacgccgttgttgaccagggcagcaccttctgggatcgtcagggtctggccctctttgatcgtcaggacctccccctgtccaagggcggcgcttccatacacttttccgtcgtccccttgaaacaggatgccggcagttaagccattctcctcaaaacccgatatatggctagttccgtattgaccacaggtggcaaagacaacggcgcttccgttcagctgatttccagtactgccctctccataacatccgcttccaattccggctccatattctccgccagttgcgttaacattgcctccgctgatgcttatattgctgccagctccagcatatccgcctccgatcccggctccaccatcgcctccgcttacagtaacatttcctccgatgatggcaatattgctgccagctccaagatctccgcctccaatcccggctccatgatatccgccgcttgctttcagtgtgcacgctgtgccatctgtcagtctgccgatcgtcagtttgccgatgccgtctgtttctccattcttttccagtccggcacacccaggcccgcctgccagtatattcgtacctttaagtttgatattcacgttccctgtggaattatctgctatcttaagcgccgcagcataatttgtttccgatacgtcaatggtcacatccgccagggtgatatccgcatttacttcgtcatccaccaggatcacactttgatactggccttcggatccgttagaaagagtgcccgcccatgtaccggaaaccgtgtagctgccatgatctgtcagcgtgaagcccctgccctgggtgtagacagccttcccatcgtctgatgctatggtgatccctcccacagtgatttcattaatggtaagctctgcctgcccgatggaatccacataaccaccgccgctgccgctgccgccgtattccgcagtcagggtattagggcctaattcccagccttgatcactggttatagtgaatggatcactctcagccaccccgccgttaaccgccgccttggcaagtatccggtctcccaatttgaagatcacctcatcgagggaagcttttcggcttctgggagctactctcccaatcgttgcctgcaggaaaactgtatctccaatagcggctttgtctgccacggccccatcctttacaatagccactgtggtccgtgatagggcagagtttggctgatttccgtaaatgttctcgcttcctttaatcataccgtgattattgatagcaccgttattggtaatcgttccttcattagtaatcgtgccattgttcgtcaggattacgccttcctttattgtcagcgtgtgaccttcctcaatcgtcaaggttttatcctgtggtatggcaacatccatggaaatggcgggatcaccgtacacctttccgttgctgccctcgaacaaaacgccgcttgttatgccgcctataaagcctgatatatgctcgtctatacctgtaccatgggttgcaaagacaatggcactgtccttcagctgattgccggtactatctggtaccttattataataacctccgtgtccgattcctgtaccgccaacatatatatcatatccatcgcctccggctgcgatcaccataccaccgctaatggtaatattgctgcctgctccaaaactaccaccgccaattccggctccagaatagcctccggttgccttaacatctcctttactgattttaatttcggttcccactccattagcgcctccgccgattccagctccttcagtgcctccggctgcggtaacatctcctccggcaatctcaatatcacttcccgctccattagagcctccgccgattcccgctccagaatcgcctccggttgcctcaacatctcctccgttaatcttaataatgcttcccgctcctttatagcctccgccaatacccgctccagaatagcccccggttgccttaacatttcctccggcaatctcaatattacttcccgctcctttagagcctccgccgattcccgctccagaatcgcctccggctgccttgacatctcctccgttaatcttaatattgattcccgctccagtagagcctccgccaattcccgctccaaaatagcctccggttgccttaacatctcctctggcaatctcaatattgcttcccgctccagtagagcctccgccaattcccgctccaaaatagcctccggttgcgtccagtgtaccatcgccgccaatcgatagcttaccaatcgtgtctccttctccgttcttttgcagcccggcacagtacaatccgcttttcagcgtattactgcccgtaagcgtgatggtgacatttcctgtggaattatctgctatttttaatgccgcaacatactctgtcccggatacatcaatatttacattgtccagggtgacatcagcatttacaccgtctgccacaaaaatcaaacttttggaatccccccatattaagtcagtggtactgccgctccacgtaccggaaaccttgtaatcgccgctttctgtcagcctgaagccatcatagctgttatactcaacctgcccccctttcgtggcagttatggtgatattcccctccgtaactgtaccactgacaccagacagctcctcactgccgaataaagaagggatttccaatccttcttcacctaggccgggcgtatacccccccccctgtatttctggccaggcatcctcaaagatggagtcctccggcccttcttccacttcaccgcagacaccgcacacaaaggtacagggacttccctctgtgccttgggtataaccgcagtccccgtcatgttccccccgttcatgagggcagtccaggacttttgtgatacaccccgtgtcctcactgcacacatggctgcacccggcttgcccgggatcctctccctcatacagggaagctccatctcccataacatctgtcaccacaccgcattctgccgtatgctcatggacacaattctccacccacacataacagtctccggtatgctcatggctgcagggcattcccggctgcgcttccacatagccgcagtctgttgtgtgctccgggtgatgtgggcacacaccgctccctgtcccgccagtgcctcctgatgccccgtaggccggtgcgccggacatggtaaagaccatagccacagacaccagtaccgccgtcacccgcttcctaattctgatccctctcatagatataattcctcctgttcattcaaacattgccttttaatatctgatctgccaaaagctcctcatacaaaggcctttcctaaccatgtccggccaggtcctgcccagatcctcccggacttgagtggaaaaccatccagcccatggtatgaagaaaagatgacaatccccggagcagctataggcatagctgtctcctgttaaaaggttctgagtacattataccagataagaaatgcttccagccctaccattcgtgacgttttcttaccattcgtgacacttctattataaatcacatggaaatccttaccaggaaaagcggaatcagatactcaataattgaatcaaggagctgccatataaaaatcatccctttcgtcaccttccctttttgcaaaagaaaaacaggacgcaccctttatggacacatcctgtttccctgccgttttgctttttctacttcttcgtcatgcagctttgccttgtacatcttctcataaggttcttttaagaacgcttaacaaatacaggcatggattccagggtaagattgacctcgatccactggccgccctgataggcttcctttgtctcgccttcctcccagatcacatcttttcccggcagatagactcttcttgtgcaagcccccgcttccagaacaggagcagccagaatcctgcttccatagaggtactcatcttccacctcccacgcctggtcatcctctggatattcataaaacaagggacgcataaccggagttcccttttcatgggcctccttcatcaggcttcttgtatagtctcgtaatttttccctgatctccatgtatttcttacagatctcatacaccctagggccatagctccatacctcattggctgctccagaacagcaggaagcccctcccgttgttcccacctgaggctgtctgggctctcggtccccatgaaggcgcatcaccggacagaaggccccccactggaaccatctcacgaaaagctcctgaaaggccgggtccttggggtcacccccatggaagccaccaatatccgtggtccaccagggtattcccgccattcccatattaaggcctgcacataattgatttctcatgctgtcaaagcttgaggcaatgtctccggaccataccagcgcaccgtatttctggcttcctgcccaggcacaccgcaggagattcacaatattttcctggccctccttctccatcccctcataaaaggtacgggcatactccagagggtagatatttccaatttccaaatctgtacccagatagtaacggtaattatcaaaatcgtaagccgtgtactctggctctgcctcatccagccagaagatgcggatgccctttttataatagttttccttggccttatcccacagatagcttctcgccccagggttggtggcatcgtaatggatggttgccccctgaaaattcaggccagtgcgaaagcctctctctgttcttatcagatatcccttttccaacatttcctcatagttttcactttcccggtccactgtgggccagatggaaaccataagctcaatccccatctcctttagttcctgtaccatcccgtcagggtccggccagtacactgggtcaaatttccagtccccctgcctgggccagtggaaaaagtcaatgacgatcacatcaatgggcagtccccttcttttatactctctggccacctccagcagctcctcctgggtctgatagcgcagcttgcactgccagaagcccaggccatattccggcatcatgggcacagttcccactgcccgggcataggcctcctggatttcctttggtgtatcccctgccgtcacccagtaatccagatttttcgtggcataggcctcaaaggtcatgatattctgtccaaatacagctcttcccaccccaggattattccatagaaagccgtagcccttggatgaaagaaagaaaggaacgctggcctgggaatttctgtgggccagctcaaggtccagaccctttaagtttaaatagggctgctggtactggcccattccgtagattttctccttccggtccctggattcaaaccgcatggacaaatgataatctcctcccacattgggacgaaactcccttccctccacctcaatggcgctgcacttgggatccagcacatcccttcggtcacgccaatactcctctagaaggacctctcctttcctgttggagatggtaattttcccaaacctggagattcgggcgctgatattgccatttgtgatccgggcaccattttcctcctctttgatttcacacagagaatccttttgagggagcagggcccagtcccggtccggcatctggcagtcctttgtggcccttatgcgcagggcattttctccccatggctctatccatacttcctccgcatcataatgaaagatgagctttttgtctttgattcttatcattgcgactcctccttttcttgggcgcacctatcccttcaccgcaccgctggtcattccgctgataatgtatttctgcataaagataaagatcaatgccacaggaatgatggtgaccaccgcaaaggcggtgaggtaactccattttgttccatactgtcccataaaattgaaaattcctgctgtgatgggccgtttttgctggtcaatgataaaggtcattccataggccagatctccccatgcatacaggaaggaaaaaatagcacagaccattactcccggcttggcaatggggaccagcactttcacaaaggccccaagacggctgcagccgtcaatatatgccgcctcctccagctccttgggaatggacgcaaaataattcttaaggatcagcacggaaaaaggaattcctatggtagcgtctgccagaatggccgcccctgccgtgttgtacaaatgcatatttctgaacatcataaacattggggtcaaaagcactgccacaggaagcatctgggtgaccagaaagcccagcatcactaatttctttcctttaaaatgatattttgcaattccataggaagccggtactgccaaaagcactgccaccacagtggctcctgctgatataaggaagctgttggcaaaggactggaacatattgaaatctcccatctccacttgggccgcataggattttacattcaccacctttggccagaaggtaggagggatctggaaaatctccttttccgtctttaaggaggtgaccacgatccaataaaggggaaacagcagaatcactaaaagtacaattgacatcacacacaagaatacatttttctttcctgtaagctttttatcctgatccatcactcttcctcctttgttgcccgcagataaaagatccccacaataagcaggatgacaaacaatacatttgcaaccgccgatcctttgctgtatttaaacatttcaaaggacagcttataagaataggtggaaagcatatgggtggagttcaccggtcctccgctggtcatcacatataccaggtcaaaaaccttaaaggtatagataaagcccaggataagaacggattcaatggtggatttcagcagcggcaaagtgatcttgaaaaaggattggatcttgcctgccccgtcaatggaagcactttcatacaattccttgggtatggtagtcagtccagtggagatcaagatcatattaaaaggaatgccgatccagatgttggcgcagataatggcaaacatggctgttcccgtgctggtgagccactcaatgttttcctgaataagccccagattccgcagaataaaattcaaaattcccacatcggtaccaaagatgaatttaaacatcagcgccgttaccgtgatggggatcatccagggcatcatcagcagtcctcttactggcttggacagcttaaaattctgattaaaaaataaagccagggcaaagccgatgagaaactgtaccacaagacaggatactgtaaagatcaaggtgttgaacaaagccttgataaaaaccttatcctgaaaaatttgaatgtaattttcaagccctgcaaaaggcttatccggcgagatcaatgtctggatggtcacatcctgaaagctgagaataatattcttcacaatgggatatcccacaaatatcaacatatagatcaaagccggcagtacaaataacagacccacattgtcataaccgaaaactttcttggcttttttcatgcagccgctcctttctgttttgaagtttttcacccttttttgagtacctctgaagggtttttgtgcaaaaatagggagtacacggatttcccgcatactccgtatttacaagatttttaataggctatgaaacaatcccgtctatggttgcctgtgcctctgcggctgcatctgctggttctgcagaaccggtcatcacctggttgaatgccagggaaatggcatcggatacctccggccactgtgccagcggtcctctggcctgagcataatccatctgctccacaaattttttgtaaactgcgtctgcctcatcggagaactgcttggcggcaatctccttatccgcagaaatatatcccatggtggacatcataaagtttacctgctcttctgcagtggcatactcaaggaaattcaaggctccttcttcatttcttccggcgatcactgcatagttctctcctcctatagaggatgcgtactgggtatccatgggaattaaggtcacatcccaatttaagtcaggcgcttcttctctcatggtaggaatctgccaggggccgttcaccatcatagccacattcccggaaatgaactgattcatcacatccccctgggtccagttgatacattccttgctcataacaccagaatccaccagatccttcacaaaggtcagtgcccggatcccattttcagaatcaatctcataggaggtagcccctgtggaccacagccatggtgcaaagttgaaggttccttcttcattctgaaggctgcagaatgccaggccgctcaccttatcggtggtgagcttctgggctgtctccttcagctcatcccaggttgtgggagcctgggtgatccctgcttcctcaaacatatcctgattataataaagagccagacagttacagccaaagggaactccataaagtacatcgtcgatggtagcggatgccactggtccctcataataattgctcacatcaaattttcccgtgatgtctgcaaaaattcccatggatgcataggacgcatggtccggagaatccagaagtaccagatccggaagctcgttggcagaagctcctatggaaagctgctttttaaaatctgcaaagggtatgtatttggcagttaccttataatctccctgctgctcattgtatccgtcgatcatctcattgagggccttctggtgtccttccgtctcccaataataccaaagtgttacatcctgggcctcagcggcgcttacggtcatcgctccggtgagcatccctgctgccataacggcacttgtgagaattgcagccatttttttcattttcatcttaattcctcctttattgctctttcactgtgtttgttttgatgaattaagaatacatctttttcttctgtcccataatgagagaaatcttaaaaaggataaaaaaactaatgtcatttgtgagttttacgataatctgccggaagctgtcccgtcacctcccgaaaaaccctgctgaaatatttaggatcagaatatcccaccttctctgcgatctcatacaatttcaaggaggtgccaatgagaagctcctttgccttggtgatccggaaattcttcatataggcgctgaaggtggttcccatttctttatgaaatctggtccccagatattccggggtgatattcagctttccagcgatctcctccagggtaatgcctgtctgataaaattcctggataagactctgggctcttttcaccgtaagatgaaggatctggtcttcctcctggacaaggcgctgtgtcaaaagtccggaggcctccttcagctctctgcaggtcctggctcccatgatccgctccagaagcttctgctgctccaggccctcatagtccaggatccccacttcctttcctgtgttcatcagggcccataaaaatctcacatgacattctttgatctctcttggcgcatagagatttccctgctgaaagtaatcactgaatctgtccaagatgtcttttatgccctccgtgcggcctgcacagaccataagcttcatctggttctcaatctccaggggatagatgcagggataggtctgaagcctggtgatcttggggtaagagatcatcacatcatcccccagagagatgttccagtccatgttcctaaataaagactccacaccgcctctgagctcctccagcttcagcgaatctaaaaatcccactgtgcccgcaacccttcttcccctgtcctgcaaaagccgatactgggcccatctcttgagttcctttacattcctggtgccataggtgaggatcacaagggccttttctctgtctgcctccaatagaaggaagctctgcccctccctctctgaaaacaatgtctccacatccctgacagccttcggcctgtcctgtgtgtaggagtctcctaaataaatacacactgcctcatagaaagcatcctccggtatggagaagttcgcctgtatcctctccttcatctcccggtccgtcttcagattcccccacaatattcctgaaaaaatctgttccaggctgctgaaggcctcctccgaatagctcttctctcccttaatctcctctgtcacccggcgaagggcctcggctatatcccctaccacaaggggcttgagaagatattcctttacccccagacgcatggcctgtctggcatattcaaattctgaataggcacttaatacaatggccttcgctctggcaccttcctgatacacgcgggtaagcatttccaggccgtccatttccggcattttaatatctgtgataataatgtccggacacacctgctccaccaaagcaagtccttcttttccattttgggcctctcccacaatctcataaattccgctgagctttttaataagtctggcaaggccctccctgattcgaatctcatcctcaatgatcacaatcttcattttccacttctcctgggataaacggtatccatatctgaattttcgtataggcatccagagtgctctcaatctctgccctgccttcatcaccataatacattttaatccggttcatggcattttctatgccaatgtggtttttctccgtgcttgactgaaaaatccccttgttcatctgctccaccaaatcctgggggatccctctgccattgtcataaatggtaatgtgcaggcggctgtcctgtctgttgattttcacggataaaaagtgggttctgctggtcccttcaaatccatgaagaatggcattctccacaaaaggctggaagagcagcttatgtatctggcagtccataagatccggctccacctggaattcacattcaaaggtgtttttcagccgtgtctgctgcaaaaacagatattgtctcagccactggcattcctggcgcagggtgacaatgccgttgctgttgtcaatcccgtatctgagaatactggccagggcattgatggaattgctgatctcatactcctccttgtcaatggccatccagttaatggtatccagggtattatacagaaaatgtgggttcatctgggcttccagagcagcgatctgcgcatgcctctgccgctctcccgcttccctctccttatccagagagtccgacagtcttcccagcatatggttaaattcatgggcaatggtctccacttctgagggcatgcttttctccacctgcacccgggcagtgagctccccttttcccgcctttttcattaccacggccatattctgaagagagccggtgagacggcgtatgagaatccggatcaccagcacaagcataagcaaggacacagacaggatggtgagcatgattttctgctgtctgttcaaccggctcaccacctcctcctggctggatacattcacaatgtcccactggaatttatcgtcatgtacaaaatccacagccatgtgtccgcccccaagactgctgtttttctgcagaaattcttcataggccgccttgcgctcctcctggtcctccttccaggtaattacctgtgtggccagcagttcctgccagggataggagatcatcctccctgctgcgtctacaatgaaattaaacccgctgtccagactttcttcactgctgcacacactgccaagcagctcttcatccacactgaccactaccactcccagctgtttctccacatcccggtaatcgatcaccctgtgccccaaatggaacagatagtgggtatctgagccaaattcaatggctttctgtgtggaaataatgtgggtctgattgtctgaagagatcagggaatacagctcctccctggtcatgtcaatgttatccagccaggaatttctggtactggagccagttaacagatcataaaacaccaaggttccattttctgtgaggatggaaatgcacttaatgtattcctttgtataaaacaatccatgaagcgtcctgcgcagctggtttttgctcacggacacatccatccctttgttgattttatcaattaaggccacaatatcatcgtctgtatatacctgaaataaaatatcttcataagattccaaccacacgtccagactgctcctggtctgtcttaaattggagcgtgtgagctcctgaacattgtccttcacaatgctggaggtattataataagaaaacaggttcacaaggataatgggtatgatggaggtaataaaaaatgccagaatgagacgtgtccttagactggcttttttcatatgtttattcctatctgcccgctgttctttgggtttaagagaactatgctctgtgaatttttccaatttcatctggcttctccttcttcttgtggctgctgtattgtattcttgctctcagtctaccacggaccttggatgagaatcaagggatttcccaggagccactgtaccaaatccatcccttcactgaaacaagtaagagggaaaagcttcagttttgcatattgcacaaaaaccaatatctttacatatctattatgcacaaatttgttcacgtccttccagtccccaatgacaatttatgaaaaaatgtaacaaattatgcaaaaatcagagctcttcatctgccatatgatatattgtagtctaagaacagacgctctggatcgctgcgcagccctatgtcttgttcattatgttcagtaaatcgtgtgcaataaggaggaaatgaaaagatgacaactaaatttttacgtatggcattaggtacttttgcggcagcttcgctggtttgcagtacagctgtgtatgctcaggaggtggaagaaattagttacgcaactattacagaagtattcgattttggatcatccgtctcgaaaatcgtggtagatactggtaaaatgcaggaagccgggacagaggtaaagccggaagattttaccgtatctgtggagagaaaatatgaagggacttcccagctggttcaggaaatgtcctgggagacctttgaatatgccgaatcaccaactgcaaaaggagaaagaaccgttacaggagcctatctttctgataaagacgggaaccccacagaagaagccaccacttacgtgaccctggagatgagctatggaccaagcgagggctttggtaatcccctgggcgttaatactgaaaattccattggtttaagcgtggtattagactgcgattacaccatccgctataaagacgcagacggaaacgaaattgtctgcgaccagaaaaaggatgaggactgtaaaatcatcggcgttgatgactttacccacggacaaagctataccaccaaaacccaggagctcctggacgacggcctggaaaacgataccctgtattacgcaagctatacccccgagacagaagccgaaacacatcccctgatcatctggcttcacggaatgggtgagggcggaactgacacaagagttcccgtattaggcgcaaaagccacgaacctgatcggtgatgagatccagggctatatggacggcgcttatgtgctcatcccacagtgccccaccgtatggatggatacggacggaagcggagagatcgctttaaccgcagaggcacatgattccatttacacccagaccctcatggaactgatccagtcctatgtggaagcaaatccctccattgacaccaaccgcatttacattggcggctgctccaacggcggctatatgaccattgaaatgctgcttcactacccagattattttgcagcaggttatcctgtatgcgaagcctataacgatgaatttatcaccgatgaggagatcgatacactgaaaaatatccccatctggtttacccacgcagcctctgatccgctggttgtgccggatgtctgcaccgtgcctacctacgagcgtctccttgcagccggggccgaaaatgctcattttacttactggacaagcgtattcgacaccacgggcttattcaaagatgaggcaggaaatcctctggaatacttcggccatgcaagctggcagtatgcactggatgatcagtgtacaatagacaacgactatgttaagggcagcaccacggactccaagggaaccggacagaccttgttccagtggctttcccagcagacacttgcccaggagtaaaaaaaacgtataatcacaaggtaccagggaccgcacttgaatctaagtgcggtccccttatttgttaaatatcattgaatggagcgcttcggcaacgatacaggtaccgaggaactggcccatttggaaatggtagccaccatggtccatcagctcaccaggaatctttccatggaagagattgaaaaatctggctttggcccctattatattgaccatgccgtaggcatctggccccaggccgcggcaggtattcccttcaacgcctgtgaattccagtgtaagggggatcctattgcggacttaaacgaggacctggctgcagaacagaaagcccgggcaacctatgacaacattctgcgtgttgtgcgggatatcccggaaatcgcagaccccattaaattcctgcgggccagagaagttgtccattatcaaaggtttggagaagttctccggaaaatccaggaagacctggatgccaagaacttctatgcctttaaccccagctttgacaatccctgcatggccgtgtgcgacaaaaactgcagcggaaactgaaccagtcagtatccgtgatttatcaacaatagggaaccccggcggctctggaaaattcggcccacgccggttaagagtccttacggggacccgtgcagccagaaaagaggatgctttggcatcctcttttttcttacactctatttgtttttggcatacagtattttgagagacattccaggagcttttccatggaatagggcttcgaaagatatccggtcattccgcagcttatggcctggtcaatatcctgctgaaacgcgttggcggaaagtccaatgataggaatggttcctgcctgctcatgggcagaatcccgaattttccggctagcctccagcccatccatctccggcatctgcacatccatcaaaatggcatcgtaggttccgggatgtgaattcaaaagtttgtccacagcctcttttccattttttaccctgtccacctgggctcccttcatttccagcatggaggaggcaatctccagattcagatcattgtcatctgcaaggagcagacgaaaacctgccagatccttcagttccgctgccgtaagcgtttgtgcttcctggggatgcacctgggcatcctctgccagcggcagctccaccgtgactgtaaactgagaaccttccccctcctggctgcacactgcgatctcccctcccataagggataccagattgctgctgatggcaagccccagaccggtacccccatatctatgggaaatagatgcctctgcctgctcaaagggctggaaaattttatctctggcctcctttgtcattccgatccctgtatctgtgacaacaatcttaatcccacatttattctgataaacatgctcctgctcaatggtgaccttcaccgtcccctgttccggggtaaatttcattgcatttgaaataatatttacgatcacctgggtgagccgcaactcatctcccaccacaaagggacaggaaatgttctgggtgatcacctggaaatggatgtgggaatcctgggccttctgggagaacatgctttgcagccgctgggcaaattccataaggctgaagctttcacagtaaagctctacctttccgttttcaatccgggacatatccagaatatcgttgatcagagacaacagaaaatctgaggaaagcttaatcttatccaggcactcttccaccttgttccggtcattcagggacattttggcaatctcggtcattccaatgatgccgttcatgggcgtacggatctcgtgagacattctggacaaaaattcgctcttttctctgctggcccgctctgcatgctccagctcactgacgattttcttctgccggatctgataaagcctgaaaaaagcgataacgatgagaaaccctccatccagaatgatcagaagccagataccagactggatctcactctctgaataatcctccgctgaagaaactgccgcatctgccaaaataaaatgcgattcactgagctggtacagcctgtccgcaggacctccctggcgcacattttgtatttcctgtttcaaatcctcccaggccgttctcagctcttttatatattcctggtactgggatgtcttgataggcaccagtcccagcttattttctttagaagacagaccaaaaagaatttcatccagcttttcaatcagctcatcgttcttcctgccgttcatctcctgtttcaccaggcgctgagtggcccctctgacaattcctgtgtagttgattatccggccgattccctgggcacgctgaatggatgccagagatacaagactgataacaacaatggcagttaccagcagtactgggatcagacgcttctgccatgatgcatccttttttggtttcatgcccccatacctccccaaaaagtaaaaaagactcttttattcctctcattgtaacacaggtattttaagaagtcgattacaattcagggaagcttcaaagtaaacctttttcatcctattttatagcatctgtttatactccattgatccaaagttccgggcttatgatttttccaatccttcactgttaaatggggggataaagctctcgcgggccgtctccccttcctggaaaaatccctgctctattcccagctccagggcataattcagcaccttttcatactcccggctggtgaccctgcggttgatctctgggtaagcatttaaaccggaaaagggagtaaactgattcataatactcacataaatcttttctccataggtttcatgaaggtagcaaagaatgttcctggaatccctggtgtgtccaggcagtaccagatgacgcacaatggtgcctttttgaatatacccctggtggtcaaacctgcattcccccgtctgcctcaccatctcctccagtgcccttttggcccagccagggtaatcaaatgcgtgggagtaccggagggccagctctgggtccatatatttaaaatccggcagatacacatccaccagaccgtccagcagctttaaagtatccggcttttcgtatccgctgctgttgtagatcacagggagcttaagcccctgctcctttgcccgtgcaagggcacaggcggtccagggcgtataatggcaggcagttaccagattgagattggccgcccctttctcctgaagctccagaaagatctcaccaagccgctcaaaggacacttccattccccattctcccctggagatctcccggttctggcaaaacacacagcccagggagcacccggtaaaaaatacggctccagatcccttttccccggatatgcagggctcctcccacatatgcaaagcggcacgggcagcccaaatgctgctgtccatgccgcagatccccctctcccccgctaaacggttcacatgacattccctgggacagagggtacagtcccggaatttctcaattgccgcagtgatgtccgcactcatgatcgccgtggtcctcacagtttccttctccgtggtcatgatgatggctgcacacagtgtccggatcatagttcaagcttccggccaggtaggcgtccacctgtgcgtctgcatctccgcaggctcccgggaggagctcaatccctgcctctgccagggcatttctggcgccgccgccgatgcctccgcagatcagcacctccacgccctgggccttcagaaagcctgccaaggccccatgtccgctgccgttggtgtctgtcacttttgtggccgtgatttttccatcctccacctcatagattttaaactgttctgtgtgtccaaaatgctgaaatacctgtccgttttcataagttactgcaattctcatcttccattctcctttttctgtgattttttccgggtatgctctttttcttcccataccatttcggggggaacccagcctgtaatttcctccggaaatctccaggcaggctccttccaccagaaacctggccaattttttacgggcttccccataaagggtctgcacagttgcccgtccaacctccatctgggaggcgcactcctcctgggtatatccggaatagtcaataagccggatggtttcatattcttccactgtcaggttgattttatgggcattttccggctgttctcctggtaaaaaacggtcccacgccggaagtctgcacactcgcttttctttatttggccttggcataaggtgcctcctttttattggcatatgctaattattaatatacttcaattattagcatatgtcaataatatatttcaaaaaaatggacaggaccagaatccggtatccgcttccccgcagatacctaaaatccttatcctatccgttttatgattgtgctccctcaccgatgatttttaatatctctttcttatactccagaaattctggtgtgagattaaagtcccctctccggggctttggctccctgatcacaagctctctggtgatctgtcccggctgtcctgtgagaagatagatcctatccgaaagcaaaatggcctcgtcaatatcatgggtaataaacagcgtggacaggtgaatctgctccatgatatttaaataccaggtatgaaggctgcttttggttatggtatccagggcagagaagggttcatccagaagggccacatttctggaaaacatataggttctcatgagcgccgccctctggcgcatccccccggaaagctgtctgggatacttcttctgcgtcccattcaggccaaattcttcaaaatacgcagccacctggcttctggcctctttctttttcattcccttgatcatcagaggcagagccacattgtcttcaatggtccgatagggaagaagcagatccttctggagcatatagctgatcttcccgggttttcctgtaatatcctctccgtccaggaacacctgtccggtatccggaaggctaaggccagagatgacattgaataaagtagtctttcctcctccgctgatcccaagaagacacaccagctctccttccttcagctctatggaaatatcgtggatgacttctttcccgtcaaaggatttgcttacatgttttaccgctaactgggacatttccttccccttcctctattttggcagatactcgttggaaaagcctgcattttccggaagctctgcctccaccagctcattttcattgagccactggtagaacgcattccacctggccggatcaatataaccccactgctctacttctgccttatattcatctgccagatatttctgactttccaaaaccagctccttgtccagctccggtgaagcctcacagagaatgtccgccgcctcctggggatgttcaatggcatattcatagccgtccctgagagctgtcaaaaactttgtggcagtctccggctcttcctccagaaattcattgtttgcgatcaccaccggcgtgtagtaatcaaagaccggattaatgtccttaaaggcaaaatagtcggtttccagaccttccagctccatcttcacaccagcccaggcatagaagatccagatggcgtccacagcctttgacgcaaggcctgacacctcgtccgtgacagtactggggatcatctccaccttgctgtaatcgcccccgtcctgctctaccacgtttttgatcatggccctctccacaggagcatcccaggtggcatatttcttgccctccatgcccttgggggtgtccatcccttctcccttgcgggataccacaccggaggtattgtgctggatcaaggccgccaccgctgtatttggaagggcgttatcccccgccacgcctggagccatggaatcctggaaggaaactcccagctgagcttttcccgaggccaccagagcgtccgctccgtcctccggcggctgtacgatctccacctccagcccctggtcttcaaaatatcccagactctgtgccacatacacccctgtgtgattggtattgggcgtccagtccaatacaaaggtcagcttttctttttcctcatcctgggcatacacaaggctgcccgctggtacagacatagtcatcgctgcagccagagcggctgccagaagtttcttattattcatttttttcatcctcccacggcatggcttttttctgcagaacctccaccagcttcatgagaatcaggctgataaaggaaatgagaaaaatcaccgcaaacattttatcaaaggcaaatgcctttttcactcttgtcatataaactccaagtccgctgaagcctcccagccattccgagatcacggcccccaccacagaataggacacagagatacgcagactggcaaagaactgactcatggctcccggaagcttaatataccggaaaatctggaatttcccggctcccatggagcgcagcagattcatggtatccttatctgccgagcggaatccgtccagcagccccacagtaatggggaaaaaggtaacgatcacgatcaggatgatcttcggaagcatctcataaccgaaccacagcaccagaaggggggcaatggccaccgtgggcactgtctgggtgaccacgatcaagggatagaaggccttgtaaagtccttcaaagcggtccatgagcacagccatcacaaagcccaccgtcactccccagaagagccccagaaaagcctccaccaaggtgatcctggcattttccataagcaggggaaattcttttacaaaggcctggagcacctgaaccggggaaggcagcgtataccctgggacaattcccagggccgacactgcctgccacaggatcaagatcaccccaatggcagcaatggcattaagcctgctggtgatgctttgtaaccttcttttcaatggtcagcacgtctccttccggcttgtaggtaactttaatataagcagccacagagggagcccctgcccggatggcaatatgctggcattccttcacaatatccataagctggtcatagtctccttcaatggcggtctcaaagggtcccacataacagttcagccctgtacttttaatataagcgatcacctcatccaccacacggatcaattcctcgtcatcctttgcctctggcaaaacctgaatagctacacttgcgttcatattatttttctcctcctattttaaaaaatactcctgtagggaacctacaggagtaaaatgctttggccatacggtcaaacctggtatgttccctacgctggcattacccagatcaggttaaagggtcagatcacgaaacggtaatcctctcagccggtcttcaccagcacccctattgtttttctatacaatctttagtctaaccaattctgtgcggtctgtcaagtaaagatcacagaattttacggctataaagaggaacaaagttccataaatttgtgtacttcttcaccggagcaggtcatcagacggctcatcatgcagactccctgggcccctgtctttgagataagacaaagctttgtctcatccacacctcctatggcaaacaccggaatggacactgcatgcacaatctcttccaaaaaatccagacctcttcccggcagcccccgcttacagtctgtggggaaaatatggcccacaatgagaaagtcggcccccaattcctgtgcttcccgtgcctccgccagggaatgcaccgagacgccgatcctttcaaactgctgccggatctgggggcattccttcagctgtcccaaggacacctgaatcttctgggctcccagttccttggctgtttccacaaaatgattcaaaaacagttctgtctcataaccggagcattccctgaaaaaccgctgtgccaattcccggtacctgtccggagatacctccttttcccttaggatgatccctttcacacccgcttctgccaaacatctgagtctttcccagaaatcctcctggctaaagcaatgcttccggctagtgacgcaccacagggaaaagggttcttctgtgcccccacagctacacatagatataatcactcatcaccggctgaagccccccgtctaaaatagcctggtaaatttccggcactgttctgccatcctcaatttcaaactgctcatctcccttaggctccttctgggcatgtcccccgatgcccacatccacccctgcggaaattttcgttgccgcaatgcggatgacatgatcccggaaccttgcacactccctgctggagatggtgatacctgcatagggcatgaagatccggtaggcacagatgatctgaagaagctggggttcctgcacatccttgggattgatcttattattattaataatgggccgaagccttggacaggagaaggcgatctctgcctgggggtattttctctggagcagataagcatgataccccgttgcaaaggcatctctgcgaaaatcatccagccccagaagggcggcaaagcccactccccggatccctcccagcagggctctctcctgagtgtagaagcggtatggaaaaatcctcttatttccccccagatgaagggtctcatatttgtctggatgataggtttcctggaaaaccgtgacaaagtcagcgccgcagctgtgcaggtaggcatagtcctcactgttcatgggatagacctccaggccgatcaccttgaagtagctgcgggcaattttacatgcctctccgatgtatttcacatctgacattttgggactctccccagtcaacagaaggatctcctccagccccgtgtctgcgatggccttcatctccctctcaatctcttccttgtccagctttgcccggtggatcttgttgtggcagttaaagccacagtagacgcagtaattctcgcaatagtttgcaatataaaggggagtgaacatagacacacagttgccaaagtgcttccttgtctccctctgggctctctgggccatgtcttccagataggggaaggcggctggtgacagaagggcctggaaatcttccggagataggacctctttttccaaagcccgctgtacctccctctgggtataagcttctgggcgaaactctcccgcggcctttaatacagtctccatcatgacagagtccaggacctccatcccctcctggtattccatatggttggtttcccttgttatcctgctcatttgtctgcctccggatctcttaagaatccagtgagcggggaggaggccacggcccctttttccaccacccgtccaagaccggacagataggcggcccggccggcctctatggctttcttaaatgcctctgccatagcgggcacgtctcctgccgtggcaatggccgtgttggccatcacggcggcggcccccatttccatagcctggcaggcctgggagggtcttccgatccctgcatccacaatgatgggcaggtctatttcatcgatgaggatctggataaattcctttgtacacattcccttattggtgccaatgggcgcccccagcggcatcacagacacagcccccgcatctgccaaagctctggccacatttaaatccgggtacatatagggcatgaccagaaagccctcctttgccagaatctctgttgccttgatggtctcatagttatcgggcagaaggtatttggtgtctctcataatttcaattttcacaaagtcaccgcagccgcactccctggacagtctggcaatgcgtacagcctcctgggcatctctggcgcctgaggtattgggaaggagggtcaccccctttggaatgtaatccaaaatgttttccgtacctgccgttgctcttcgaagagccagggtgatcatctgggctcccgcctgctccacggctgcctctatgagctttaatgaatattttccggaacccaggataaacctggaagtaaatgtgtgtccgcctatgatcaatggatccttgttcatgatttttatcctcttttcttatggttcttcgtatcccagaagaaggcgcagggccatgtgggcctcatgggcagcacaaagggccacccgtgtggcggcaaggccgcttccttcttccaccccgcttgttccatctccgcatatatagagctgtttcatgggtcttattgtgtgaatgtcattggcagaagaaaaacccgccattccgctgccagataccagggcgcagcccaaaagcctgcccaggacctgctctgtgagcatggccttttcacctgggtcatcgaaggcttcacagatcacctgacagtcctggaacagctccactacattgtccggttccacccttactgtatgaatctcatacgcacaccagggattgatgcccagaagctggcttttcagggcctctgttttgggaagtcccaggtctgtgatccggtactgctgccggttcagattggaaatatccactttgtcataatcaaccagcaccagttttcccacccccagcctggccaggaaaaaagcaatgttggagccaagtcctccaagtcctgcaatgcccacacagcttccttccagcttttcctggacctgctttccgtgacgtgccctcagtgcctgggtaaattcttcctgggtcatgaatcagcctcctcccacaaagcttaccacctccagggaatccccctcctgaaggagcacctgggaaaagctggcccttggcacaatggcgccgtttctctccaccgccaccctggccgtacagtatcccatgtcctttaaaagagcctccactgtcatctgtcctagcaagcgccgggtctgtccgtttaccgtaatcctacagccagtctccgtgatctttctcactgtttcaagaagggcacttactgccgggccaggctcctccttagccataatggctgagatcacggcaatgccctgaattccaagaccttttaactgaagtgcattgtccggggtgatgcctccgatggcagccacagggatgggcacctggcggcagatctctgccagcaccggcagctctaagggaatcacatccgccttggtggaagtgccaaacacggctccacagcccagataggaagcgcctgcttcccaggcctgcctggcctcctgaggattgtgtgcgctggcccctatgatctttccaggacccagggcctgcagagcctccttcaccgccagatcctccaggcccacatggaccccgtctgcatccacggccttagccacatccacccggtcattaataaggagaggcacctgatagctggcacacagagccttcatctcctgggcctctttgacaaattccgtataggacaggtttttctcccgaagctggaccatggtcactcctgccctcaaggctttctccaccctgtccgtcagacgttctcctggcaaaagccaggtcctgtccgtgaccagatacaggcggagctgttcctttgaaaacttcatctgtgtgtcctcctgtctagttttcgtcgattttcaaaagctctacctttttcccctccaggatccggttggtggtgcgcaccgcacacattttcccgcacatggaacaggtgtgacgctctgcgggcggtgtgctctcataataggctcttgcctttgccggatccatacacacctggaacatggcgtcccaatccaccttgtgacgggccctggccatttcattgtcccgttttctggctcctggtatgccttttgcaatgtctgcggcgtgggctgcgatcttcgtggcaatgatcccttcttttacatcctccacatttggaagccgcagatgctccgcaggagtcacatagcacagaaaatctgctccgctggcagccgcgatggcgcctccgatcgctccggtaatgtggtcatatcctggtgcaatgtccgtgaccaaaggtcccagcacatagaagggtgcattgtggcacaggcgcttttccagcatcatatttgcctgaatttcattcatggccatatggcccggtccttccaccatcacctgcacatccttctcccaggctctcctggtgagatttcccagctcaatgagctcacagatctggcctgcatccgtgctgtcctcaacacatcccggccggagggcatctcccaggctgatggtcacatcgtaggttctgagaatgtcaagaagctggtcataatactcatagaatggattctcatttcccgtcatctccatccaggcaaaaagcagggagccacctctggatacaatgttcatgatccttttgtcccttttaaatgcctctatggttcttctgttgatccctgcatggatggtgacaaagtccacgccttctttggcatgtgcctccaccacccgcaggaaatcctgggcagtgatctccagaagatccttctccagataaccgatggcatcatacatgggcacggtaccgatcatggccgtggatctgtccagaagcttctgacgaaacacattggtttttccatagttgctcagatccatgatagcctctgccccataggagagcgccaggtccacctttttcatctcctggtcataatcccggcagtccccggaaatccccaggtttacattgatctttgtacgcattccggtgcctattccctctggtgacagggaatggtggaagatattggaagggatcaccacctcccccgttgccataagctccctcagcttttcaatatccatttcctccttggctgccacaagctccatctctggtgtgatgatccctttctttgcagcctccatctgtgtggcgtattctctcatttcattcttcctcgtctttcttatctttcttgaaagcggatattcaaatccgcttcgctgcttatgagtttaaaaaagtgattggtgggtccatgtccttttcccaggttcagagaatgcaggatggctcctgtgacgtagcttttgccctgctccactgcctggggaaggggcagccccaaagctagattggcggttatagcactggataaggtacagccggtgccgtgggtattttttgtgtggattctctgttcttcatagacatggaattccccttcactggtcaaaagcacatccaccgcgtctccatccagatggccgccctttaccagcacattggcagtccccagcttttggatctctctggccgcctctttcatgtcctttcgggttatcagactccctcccacaagggcctctgcctccggaagattgggggtgagcagataggcctggggcagaatttctcttttcagggtgtccagggcctggggctccatgagggcacagccccctttggctgtcatcaccggatccaccacaatataagggggatgatactgggccagctttttggagacagccagcatttgttcttttccagagagcattcccaccttcaccccgtccgggggaatatcctcaaatacagcgtccatctggtcacagatggcctccggggacagatccgtcttagagatcacccggctggtgttttctgccacaacggacacgatcacactcataccgaatgtgccgtgggccgagaaggtcttcagatccgcctggatccccgcccctccgctgcagtccgagcctgcgattgtcaaacagcatttcatatatttcacctttctatgtagaataaagcggacaagcccgcttcaactccccatcctctcacttatgagggtttggcagctttgtgcgccaatgtgcagctgcaaagcagctttcctttgcacattgtgtgcgtcccccggagggctttttatgttataggcaagttcgtagaactttcctataacataaaaaactcctgccaggggaatcctgacaggagtataaaatccgacaaatagccgaagcctgttatgttccctacgctggcattacccagatcaggttaaagggtccagatacgaattggtatcaatctcagcctgcgttcgcaagctcccctatttcatctttcaattagttacagtctaacatttctttttcaaatgtcaagaaaaaatttgttttcttttacgcacaattgtttttacaggccgcacagatcatcctggcacactggacgatacccgcttttgttcagcacctcaatggccttctcattgttttccacacggaagatcatgtaggcagttcccttctgccaggtgaggaatgcatacatgtattccacatttacaccgctgtcacccaggcagcgcagcaccttggacagggagcccggttcatcgggaatctccacggcgatcaccttggtgatggagaacacataacctgcctctttgagtaccgtagaggttttatacacatcgtcaacgatcagccggacgatcccgaaatcctctgcctctgccagagacaaggcgcgcatatcaatattattctgatacagtacatctgtaaactcagccatctttcccggcgtattttccaaaaatacggaaatttgttttactgtcataatcctttctcctttttccctctgctgcttttttagctttgatataagttacgtttatcaaccacacgcacagccttgccttcgcttctggcaatactctttggcgtaaccagcttcacctttgcataaatgcccagcattgccttcagtgcgtcgatgagttccttctccttggaggcaacagcgcttaagctgtctgagaacatctccggagtcatctccacctgaacctcaatggtatcgctgttgttcacacggtctacaatgatctggtagtttgcaggatatcccttgttcataagaactgtctcaatctgtgacgggaatacattaacgcccttcacgatgagcatgtcgtcgcttctgcccagaggcttggtcatcttcacatgggtgcgtccacaggagcatttttccctgctcaggatacagatatccctggtacgatagcgaagaagagggaaggcctcttttgtgatgctggtaaataccagctcccccttctccccgtcaggaaggacttctccggtgatgggattgatgacctctgcaataaagtggtcctcattcacatgcatgcctgtctgtgcggagcactcaaaggacaccccaggaccggaaatctctgtaaggccatagatgtcaaaggcacggatccccaatttttcctcaatgtcccggcgcatttcctctgtccaggcctcagccccgaaaatgccggcttttaacttgatctgatcctgcaggcctctctcccagatgctctctgccagataagcggcataggaaggagtacagcacaaaatcgtggaccccaggtctgtcataaactgaatctgtctctccgtatttcctgaggacatgggcagggtgagacagccaaccttgtgggagccgccgttcagtcccggtccccctgtaaacagaccgtaaccgtagcatacatgacaaacatcgtccttggttcctcctgctgccacaatggcacgggcacagcagtcctcccacagatccaggtcatgctgggtgtagaaggccaccacccgtcttcctgtggtaccgctggtggactggatgcgcacacattcattcaaaggtctggccagaagtccgtagggataggcatcccttaaatcgtcctttgtaataaagggaagcttatgtaaatcctccacagacttaatatcccctggttcaagccccttctcctccatgcgttttctatagtagggcacattgtcccatacattgcgtacctgttttaccagccgctcgctctgccaggcacggatctgttcctgggaagcacactcgatttccggttgataataattttccattgtattctcgttcctttccttggcagcttggccgccagatgtttatattttgatactataactatatcactttacactgttgacgtaaacaagaattttgtgatttttagacaattttatagtcctttccaagaattctattgtgtaaaaatcccgcctgaaaccactgtaaaacaaataaaatccttgcgggatcaagtatcgccgattcatttaaaaagctgggcacacatggtctgtcccagagacaaggtctatgtgtgcagaataagggaaagctgaagttgtaaacgaaaacaaatccgtatataattaaatcagcctatgatctggaggaaacaccctatgtttacctatgaagaaatacaaaaatacagcgaaacagacattcacatatacaaatatattgtttcaaatattgataaaatccagtatatgaccattcgagaacttgcaaaagaacttcatatctccacttctaccatattacgtttttgcaataaaaataattttgatggatattctgaatttaaggacgccttaagaaaagaaattactttgcacaagaactgtccgcctatggaagatctacaggagctctccgcattttttgcaagagcagattccagtgcttttgaagaaaaactccggtttgccgtggagcagatcagaaacgcggacttgacaatttttataggtatggggtcttcgggcacattggcaaaatatggagcccgttatttctctaatatgggacatttcgccgttggactggaagatgccttttatcccatccaatcttttcagtggaaaaatacggttgttatggccttttcggaaagcggtgaaaccaaaaggctcatagaagccatccatgggtttcaacaaaagaactgctgtgtgttaagcattacaaactcacctttgtctacaatagcaaaattatcggattggaatttttcatacaatataaatcccaaacgtatgaacggaggatataatggaaccacacaggttccagttatttttattattgaagcattggcaaaaagaatataagacagaagaaacagcctgttacttgttttgtaacaggtttttttctaatataaagccatggagggaatactatgaatgaattagaaaaatgtatggcaggggaatactataattgccatgataaaatttttttggagttcaaagcccaggcaagacgcgcattgaaaaaatacaatgccctttcctatgaggaaaaagaagaaaaatcaaatattctcaaaggtctatttggaaggatcggcacaaatgtatccatcggatctccctttatctgtgattatggacgaaacatttatctggggaacaatgtatcggtgaatatgaattgcacatttgtagactgcaataaaataaccattggggataacgtgctgatcgcttcaaatgtacagctttatacagcagctcacccggttgaattatgggaaagacagacacccggctgggagccgggggataccagatatttctgccgtacttatgcacgccccattacaatcaagagcggctgctggttaggcggcggtgtgattgtcttgccaggcgtaaccatcggggaaggctgcgttataggagcgggaagcgttgtgacaaaagatattccagataattcactggcggttgggaatccatgccatgtgatccggaaaataaacatggagaaaaatcatgaagaaactagtggcatttgatttcgacggcaccattgcggatacaattcccatgtgtatagaggccttttgtgaaagcgtttctccctatacagaccactgccttacagaaaaagaggttgtacagacctttggattaaatgaggtgggaatggtgaaagcagttgtaaagaaggattgggaaagtgccttaatggacttttacaagaactatgaggctttgcatgaggaagtggatcagccttttcccggaatctatgaacttttatcctggctgaaaagtcaagaaatccttgtggcgcttcttactgggaaagggaaaaggagttgtgatatttctttgagaagattaaagttagaaaccgtttttgatgatgtattatatggctctgaagaaaaaccaaacaaagcagaaaatataaattccctgattaaaaaatattccatctctaaatcggatttttattacgttggtgatacaaaacaggatgtcttggcatgtagagaagcaaaggtggcctgcttatcagcagcatggcaggaatctgcatacagggatgttttagaaaaagagaacggtggatttgttttttactctgtccgggatctacaggaatacttgtctacgatcataataactcctcctatccggccaggcctatacgccggataggaagggcagattttttacagttcttctattgacacatctttttcaagattcttactttctacacgaactttttcaatgcttccatatttttttcttcaaattcctgaaggctcttcatgagcttaaggatatctttttctgcaccgttttcatatttgtgcagatttttcaaggcatcggtaattcccatggtactgccctggatcatcatttctgctatatgagatacggagctgtccatcatggtctgtatgttcagcatgagatacgactgtattttctccagcatgctgatccctttttcatcatatccgttttcccgaagcatggcctgggccttgtgaaggaagcttctgtagccctccagctgtttctgcaggtattcccggaactctccctcctccacgatctccagcagcttgggaatggtctccacgcccatctgggcattctggtaaacaaaatttaaaagctctgcatttccattcatgtgcctgtactccttttttcttttagcttggcacattccaggaaaactatgcatttttactcatactttacaatttctttttttaaccgcttgatgatccgtttctccagcctggaaatataggactgggaaattcccagctggtcagccacctctttctgggttctctccttcccgtccggggaggaaagtccgaagcgcagcttgataatggtctgctctctggcacttaattttccaatggccttgcccaggagatttttttccacctcgtcctccagcctgcgggcgatcatatcatcgtccgtgcccaggatatctgaaagaagaagctcgttcccgtcccagtccacattcaagggctcgtctatggatacctccatcttggtcttgctgttccggcgcagatacatgaggatctcgttctcaatgcacctggaggcataggtggccagcttgatttttttcaccggattaaaagtattgatggccttgatcagcccgatggtgccgatggagatcaagtcctccactcccacccctgtattatcgaatttcttggcaatatacaccacaaggcgcagattatgttcaatcaacagggatttggcctctttctcctgctcggtacccagcttgctgatcacaaaggcctcccgttccggagtaagaggagcgggaagcacatcggctccgccaatatagaaaatctctcccgtcctgttccacataacccctgaaattctggatatcatttgtattggataataattatagttggctgctgctttgaagctcatagatatgacccctcctattgcatcaattctgaattcaatatgatctgataatccttgcccaaagtagaaggttccaaagagatcgccaacaccggatggggaatttgaatcacttccctgggggcatggatactcagcttctctatggtgaccgcaaccatcaccccttctcttccgactccctggaatcggagaaaatggggcttcagaccgttgatcaccgtgtcttccagctcccctggttcctcctggatgtgtttcagtttctctgcagtttcttctgtaaaaagccccgtcagcacctccctgcctatgactgacacaggtgcgccgttcacagggtctttcagaaaatttcctgtatcatacagtcctgccgtatggtatacagcccctttgcaaactaaggtgaccggaaatatatgcctggctctggccagaaagcattcctttcccacggacaaaaaggtgagaacaccataggtacaggctgcaaacagcaaaaaagttttcagggtcatggaggtattctccgtgagcacatcccaaaaaccaccacacaaaaatgctgccagatacagggctgtcacagcttttatcagcagaccgccgcttctcacatcaaaggcgatgcggatcatacacaggcctaaaaacccgtgtagcagcagtcccataggaaaaaagctgtcaatgggtaaataaagaagcagacaggctcccgcagctcctgcggcggctcctatgaaacaccgaaggcgtgagcctttcaaatgaagaagccgtcccagcatgcgcacaaggagataatccattatgagatttgtcacaaagaccacatctatgtacacttccccatacataaaaaaatccccctatgacctgttttccttcactttggtaagtgagatttattataggtcacagagggtatatattttgtcaaaacccgtggggcaaaaccaagaacttttcgccctggtacgacaccttttttagacttatgtcacttgtataaaaagccttcaccacctggggaaggtgttacaggcggtccctgtcatggatgagaaagagcaggtctcttaaaggctccaccggtatctgtcccggcgcggaggcctgggaagccaccccaaaggtaacggctgagccaaagatctctcccagcacccggctgagggcgcccagctctcccatggccatggcgatcaccggctggtctgcagatttggaaaactgcctcaccacctgaaggaaacggttcacatcataaaaatcccttggcatcactgccattttcacaaggtccccgccgctgtattccagggcctgaaggcggtcaatgagaacttcctgggtctgggttttctcaaagtcatggctggatgcgatcaccttgacgccattttcctgaagacctttgatcagctccttcatctgggccggcttcttaaagaattccacgtctataagatccacaagtcctgtttttgacaccatttgattgatgtttacataatcttctgtcgaaatatgcagatctgcgccctcatcactggtgcggatggtgaaaagcagcggaatttgtccgattctgtcaagaaggcctttgatggtctcctccacctgacaggcagaaaacaggccttcataaaaatccgctctccactccaccagatcagcctttgagcaggcggcctgtgccccctgtttaaagatctcttctcttgtctttcccacaatgggcacacagatcttgggagccccttctccaatcgcaagtcctttcacaattactggtctgttcatttcttgacatctcctttttattagaataaaatggtagcagactatcgctgtaaagtagcaggcctgcccatttacaacaccgcctgcaggcaagctgcagcaaactttgatttatcacagggaggaacacttctatgaatcttaccggacacacaagactgactgcccttctgggcagccctgtctcccacagcatctctcctcttatgcacaatgaggccttccggcttttgaatctggactatgcctatttatgctttgaggtcactgaggacaccctgccaaaggccgtggatggcttaaaggcctgcaatatccgcggcttcaatctgaccatgccctgcaaaaataagatggtggagctggcggacaggctctctgacgccgccgccctcatcggagccgtgaacacggttgtgaacgatgaggggattctcaccggacacaacacagacggcatgggatatatgcagtccctgaaggatgcaggctatgacattctgggaaaaaccataacccttatgggagccgggggagctgccacagccatctgcgcccaggcagccctggacggggtgggggccattcatatttttgcccgggcttccagccgtttctgggaccggacctgccgcctggcagacaccattaatgaacgtctgccctgcagggtctttgtccatgaaaacggggatttggcggccctaaaggatgccattgcccaaagttcccttcttctaaacgccacctctgtgggtatggcaccgaatatagaccagtccatcatccaggaccccagcctgttccgcagagatttgatcgtctccgacgtgatctacaatcccagagagaccagacttcttagagaagccaaacaagcaggctgccccacctttaacggtatgtatatgctcctttatcagggtgcggaagccttccgtctgtggaccggacaagacatgcctgtggctgccataaaagaaaaatatttctcataaagtaatttctcataaacaaagggctgcccaggcagccctttgaattattcggtcacttccaccttccggttcacccggccggcaatctcttctttcacgtctgcaataaacgcctgcagatctttgggaccttcgtctcccaggaagcggcttctcactgccaccttgccctcttcctcttcctttgctcccaccactagcatataggggatcttctgaagtctggcttcccggatcttgtagccgatcttctcagccttaaggtcaatctcgccgcggatgcctgccgccttcagcgcttccagaaccttcatgccgtaatcctggtatttctcagagataggaagcaccttcacctgtaccggagccagccaggtggggaaagctcctgcaaagtgctcgatgagaatacctatgaagcgctcaatggagccgaaagcaactctgtggatcataatggggcggtgcttctcgccgtctgccccaatgtattcacagttaaagcgcaggggaagctggaaatcaagctggatggttccacactgccaggttcttccgatagaatcctccagatggaagtcgatcttaggtccgtagaaggcgccgtcgccttcattcaccacataatccaggcccaggtcatccagagcgcctcttagggcatccgtagccatctcccaatcttcgtcacttcccatggaattttccggacgggtggacaattccacatgatatttaaatccaaataactggtaaacctcatcaatgagcctggcaacgcctttgatctcgtcccggatctgatccggtgtcataaagatgtgggcatcgtcctgggtaaagcagcgcacacgcataagtccgtgaagctggccagatttctcatggcggtgcacaaggcccagctcgcccatacgaaggggcaggtcgcggtaggaacggggctctgactgatagactaaaatccctcccggacagttcatgggcttaatggcaaaatctgtctcatcaataacagtggtgtacatattttctttgtagtgatcccagtggccggaggtctcccacagatggcggctgagcatgatgggagtggagatctccacataacctgccttggtgtgaatctctctccagtaatccagcagagtgttcttcagcaccattccctttggcaggaagaagggaaatccggggccttcttctctcatcataaacaggcccagctccttacccagctttctgtggtcacgcttcttggcctcttccatgcgggtgatataagcctccaggtctgcctttttggcaaaggaggttccgtaaatacgggtgagcattttgttcttctcatttcctctccaataagcccctgccaggctggtgagtttaaatgccttcaccggcttggtgctcatgagatgggggcctgcgcacaggtctacaaactccccctgctgatagaagctgatttctgcctcctctggcagatcctggatcagctctaccttgtaaggctcgtccttttccttaaaatatgcaatggcttcgtctcttggtttggtaaaacgagtgatgggcaggttttccttgacgatcttcttcatctctgcctcgatcttttccaggtcctccgccacaaagggggtctccctgtccacgtcataataaaagccatctgcgatggacggtccaatagccagcttcgtctccggatagagacgtttcacagcctgggccataatgtgggaggtggtgtggcggaatgcaccagcgcctccttcactgtcaaaggttaaaatatttaaactgcaatccttgtccacaagggtacgcagatctacaacttctccatccacttctccggcacacgccactcttgcaaggccttcgctgatgtcggatgcaatttccagaactgtttttgcctggtcatactcttttgtagagccatcttttaatgtgattatcataattcttctcctttttattatttaaatagaaaaaaccgccccttgcaattgttataactgcaaggggcgggcaaagattctctttactcgcggttccacccttctttttgtcctatgcctcacggcagggaaaccacttcattggatgataacggaatcaccgggccggatgagggccactccgaggtagttttcaaatgcttcccaataaggcgcttccagcagctacgcctctctctggaatgttccacattttactcgtctcatctgcgtgttaacctatttattaataaactcattatatcatgagtttttcgtttgtcaacgctataaatttcccataagcttatccttcatgacagccaggatctccctgggtatataccagagaagccgccaggttcggtaaggtgccgggatcccataaattctggtacagccgcatttctttccaatggctactccccggaacacatggtaatggttggtgaccaccccaatggagctgtccagattcccaatgagccgcaggctgtaatccaggttctccttggtgttggtggaccgttcctccaggatcagccggtcaggagagatccccttctgggtaaggtactggtacatggcccgggcctctgtgatctcctctccggtgcccctgccgccggacagcacagccctggtggagggattggcaagaagatattccagtgccttgtctgcccgctcccgaagagccttggacagcaccgttcccttcacatgagcacccaggacaatgaggtagtccagattctcagggaccttcattattttccgcagcagaatttatactttttgccgcttccgcagggacatggatcattgcggcctaccttgtgccctttgacaactgtgccggatttcttctgctccaggaataattccttctgtttgtccttgctgaagatttcatcccactgaggaagctcatagagccagtctgctcttgcatctaccatatttttgtacagaagctctttatcaaagcccaggttcacctctgtgttctcatccatggtttcaatggggtttttcaccttcagggagtcattgatcccgtccaggaagcctaccatggtcatcacgtcctgtccgtatttttcggccagctctttgacggttccctttaccacttcgtctggattggatagaagctgttcataaatgcctttttcaatgttaaaataagtagcccagaatctctggagtttgtttttgtcagcctgctggtcgtaggcaatggctctccactgctccaaaattgttgtttcactcatgatttcatcctcttttcctatatttttactgatgtgcaaattttcctcttcaaagcccggcatctgccaagcgttcctattataccatttttttttccaaaagcaaaccctttcttcccacaaactgcgcaaaacgcctggcacgaaaataccgctgtctaagcctcaggcagcagcttcctacaacccaagaccacggcccggtccgccagggccaaaaaggagagggagccgaagatcacaatcacatcctccttcttggccagggccagggcattttccacagcctgctctatggaatcctgggcctgcacctgaggatttaccttttccacagcctttttcagctcctgtgcaggaagagctcttggattgtccggggtctgtaccgcaaagatctgctgtgccaggggtgcggtgatctggatcactgtctcgtagtccttgtcggcaaacacaccgaagatataatagagcttcttccctttaaaatacaattccagagattctctgagcaccttagccgctgccgggttgtgtgccccgtccagaataacggcgggctccttgtggatcagggtaaaacggcccttccacttggtcttttccatggcctcatatacctgctccctggaaatggaatagcctaatgcccgcaggctctccacagcctccaaagccagagccgcatttgtgatctgatagctgcccgccagggtaatggccacgtccttccactccttataggaaaactgctgcctctcataaccatatcggatatcctggattttctcaggctccaccacctggagggtacatccctgctccctgcacacctgacggatcacctggactgcctggggctcctgccaggctgacaccacccgggtaaaaggcttaatgatccctgccttgtttctggcaatttcctccagagtatttcccagctccatcatatgatccataccgatggaggcgatcacctccagcaccgtggtcttcaccacattggtggcatccagagtgcctcccaggccagtctccagcaccaccacatcacattttttctctttaaaatataaaaaggccagggcggtctcctgctcaaaggctgtggggatccctttcccctgagcctccatctcccgggctgcctttgcgatcgttgtcacatggcgggccagggcctccttctcaatcatctcttcgtccacctgcacccgctcccggtaggcgtacagcgttggagagacatatcttcccacccgatagccggcagttgtcagaatggtagagagaaaagccagggcagagcccttcccgttggttcctgaaatatggataaatttcagctcatcctggggattggataggcgccccagaagctctctcatggtatccagaccaagtacacttccgtatttggacacctggtccaaataaactcttgcttcctcgtaattcataattctcctaaccgggactttgtgtatcttgtcttatgtccctttactttttccgattatagtacttttttcttctggaagcaaccatatcccatgtaagagaaactattttttttgaaatttttttgaaatcctgtataagaagaaaatctggggcaatactatgattatcattgaatcccccctcaatgatacaaacaaaagaaaagaagagaaatacttatatcctcccctttaaaaaagcacgggaagttcctcgtcaggcttcccgtgcttccttatattcttttttgcaaaaatttcaagccagtaattttctctgtcaccggatcatcctttttgtacagtgatcttggcgtcgatctccttctgcagatcatctctggtcttttccatttccttctgctgctttttcagatccttcaccttatccataagggtttcgctgtccttggtaagagactctttcttcttttccagttccttggtctctttttccagctgctgtttcttcttctccagctcttccactgcttttgtcaattgctctttgtcctcttccaaatctgctttgtctttaacaagcccttccttgtccttctccagttgggctttttccccttccagggctgccttttcttcctccagcgttgccttatccttttccagggaagccttttcttcctccagagctgccttctcactttccagagattccttctcttccataagagcttccttctcctgtgtcagcttctggatctctgcctccagatcctctgtgccggaaacggcgttgctgccggcggccacggcctcttcgtcctgggaagcggcatccatctctcctgaagccgtatcctggtcattggaaggagcgtccttgtcctgccctgccttcaccttaagctccacgttggagcctgctgtctttaccgtgctgtccttggcagatgcatctgcatcatccttcgtatctgcgtcatctttggtatctgtatcgtccttggaatctgcgtcatctttgctcttatcttcggcagtctttgcagacgctgcttttgtgtccttattggaagcttccttttccagtgcggccttcaaatcctccacctgttttctcaggtcctcgttttcctttgtgagacggtccacctctgcccggagctcttcattttccttctgcagggcttcataggcttctgccttttcctgggcttccttttggagctcctcattggcagcatccttttcctgggcctctttttgactgtcatcaagactcttctggagttcctcataggcatctgccttttcctgaactccctccatatttttctccagctcttcctttgcctgtttcagatccagagactcctgcttggccgcctccagttccttctccagactgtcataatctgcctgcagagcctttagatcatccttggcacagccagaggtaaccacaaggccacaggtcattgtcagtgccagaagcactgctaccacttttttcttcatgtgtaaaacccaccctttccttttatttctttattttatttaagtagaggtctgtcaaagaatcaaaacattccttttccccatatgtcagtaaatttttttccgaatccccctttaactgtacctgtgcttcctgtcctgccgcctctaaggtttttggaagggcgtttacactctttggagaataaacctggattttctgctgctgcccgtcatagctgaaagccacagcgtaattcttgttctgatattctgccacaagaccgcaggctgaatatttggaactgatatcgaaataactgccgtttaactccaccagcccaatgcgtgcctcctgtcccggttttatccggtaggacagaagaaagttggtgccgtcaaacagaatcatctcatactgatggccattggtctctaccagtgcaggcagcttcaatattaaatctgaagtgccgttatttttcaccatcaaaagaaccaggatcgtaggcgtctcctctgcatacagccttgccgcaagcttgggagtggtactcttcatggtgcatgttactcctgttttgttataggcgcttttcgtcactttattggaatatttcacataggcccggaccgtgtaggtattggccgcattccaggtaaagcctgtgtctgtcatggttaccgtgcttcctgacgtgatggtgcggatcttcttccagccgctgccgggagttttccggtaaacctcatagccctttgccccagtgactttcttccaggtgaccttgacgcctttgttggatgcgtttttagctgacaccagctgaggtgtggccaggcctgtcaccgcatacttggtctgatagctgcttaatacctgttttcctccatctactcccacggcccgcacggtcatatagtagcgggttcccggcttcagaccggtgctggtaaagctctggcgcttccctgtgttgctccggctggctgccagcttccagctctggccgtctgtccttatgtatacccggtagctcttggcctttgccacagcatcccaggttatggttaccttgttggtcccccctgccttcactgacacgatcttgggggctgccagattcacggctccctgtacttccactgcctgcccggactgtcccaccgtaaccagacataaaaacagcagaatacagcacagaactcttattttttccttcatctttttcatactatctctcccataaatacaatggaccagccaaggcagaacacactgctcccggccttactttttatgtttcttccacccggatccgctttttccggggatgggcatacctgcctgttattataatctactctagcccatttgggcaaaatagtcaactcaatttcaaattttccggcttttttgtaatatatttttccacaatttccacttccagagtacagtatttgcattttcattaatacgattatttgaccatattcccttgatccggtcctcaggaaaggcgcagcaggactgctcccataaggtctacgtcctcctcctgatgggtggagaagatcagcgttctgccctttcgatgcctctttataaaggcgatcacctgctccctggtcttttcatccagcccggtaaagggctcatccatcaccaccacatcagagtctgccagcatggcccttgctatggcggtcctgcgcttcatccctccgctgtgccgggagatcctctgacccagacaggcccgagggagaatttcctccaggatgctctctgtctcctcctttgaaagagaattcttctgaacagctgtcacattctgaaccggggtgagaaactcaaacagccggttttcctgaaacacggcggagaacttcttctctcgcacctgttccatttctccactgtccggcttcaccaggcccataagaatgtgcagaagggtggtctttcccctgcccgatgcccccataagggcataaatgcgtccctcctcaaaggtataggtgacattttccagaaccggccttcctgcatagcttttattaatgtttttaatcctcatccgtcacctcccaggtacagccccctgcttttttcaagatccacagaaagagcttttcaaagataaggctgagcaggatgatcaccagcgtccaggcaaacaggctttctgtgttcaggtagatctttgccatgtacagacgctccccgatggagtgctccggcacgccgatgatctccgccgccaccccggatttccagctcatccccagggccaccttggagccgctcaccaaatatggcagaaaggctggccggtaaatatacaaaaacttcttccagggactcatctgataaatcttcgccatctccaccatctgtgtatccatatgagacagcccctgacccatattcacatagataatgggaaaggccatgagaaacacaatgggaaccgacagattcttagaccccataagaatgagaaggagcaccacaaaggaagccaccggaacggatttggccagcaggaccactggctccagcaggatcttcagccagcccagccgaaaggaaagtcccccaaagagaatccccagacagaaggctcccaaaaagcctcccatgatcttcaccatagaattccccatggccagccagaactccctttccgtcatctgctctgccaaagagcgcatcatatccaccggccctacaaaaacaattgaatttttcatcaacatggctccggcctgccagagcaccagccagaacaccacggccccggccttttttcccagttccttcttatccatcgtccctctccaaatcctttttctagttggcttttccaatacccgggatgccaaaaagagggacggcctttctttcagctgtccctcttttgcatgcaaacctgtggcatccggctcctactgagcctcctcttgggctgtcgtaacgcccatatagtaaaaatcatctcccggaaggcttccgcctacagattccggattctggtcataaagcacctgaagatatcctgtgagagcggttttcatctcttccttctccacataggtaatgttgcacttgggaagagccttctctgcaattggcgccttctccacgatcccataggaagcgatcagctccgcggtctccccagtgttttcattggcatactgtgcagattctttgtgtccgtccaggaacttctggatcagctccggattgctttcaataaaatccttctttgcaactgtcacacctgtgaccagggtgcccttccctgtcttatcccattcctgggtcaggtcggataccatctgcagcttgtcattctgctggcaggccactgtggcgaagggctgggggagcaggccgatggccgtctcgtcctgtgccagaacagataccacctctgcagcctcggacttgaactccacagtcacgtccccttcttcaaagccattggcaaggagaagataattcaatactgcctccggggtctgtccttttccagtggtgtagactgtctttcccttcagatccgccactgaggtgatggaggaatctgcagttaccaggtagaggacccctaaggtattaatgtctattacctgtacatttccctttgttttattatacagcacgcttgccatgttggcgggaaccagggcaatgtccagcttgccccctgtgaagtcagccacgatctcgtctgcggctgttgccattttaaaagtaaactccggttcctcctccttctcctgctggtccataaagtgtaccagccccatggaggtgggacccttcagggagccgacccctgccgcgtcctgggccgttgcggtcactgcgcctcccagaagcatggacacagacaaagctgctgtcaggatcatggataccatctttttcatattcattccttctttcttatggtttcctgtttcttactctattttaacttttccctgttaaaaagtcaacttgtgaaagaaggatgttcttataccaccccaagcttttccaggtcagcggcagcctgcttaaagtcccggaataaaatggtatgtaaccccagcttcctggctgtctccagattctcctcccggtcatccaggaacactgctctgcgtggatcgatcccataagaatccagcagaatatgataaatctccggctctggcttaatggcctttacatcacaggaaaacacaatgccgtccatatacttcagcggcatgagatgccgggtctttttcaaggtggtggcgcagtagttggacaggacgtacagatgatagccctgggattttaaatatttcacccaggtttctgcatagtcgaagggcttgatggtctcatgggcccctgcaaatagtttccgcacatccgcctcatactcaggggcagcggcgatgaaccggttcagaatctcttcatcgggaactccccggtccctttcgttccagtcatcacttaaaaacatggccttttccagggccctgcgcttctcctgcggaaaatgaaagctgtccaggtaggattcccagtcaaaattcacaagcacgtttcccatatcaaagataatggagtctacctgtctattctttccctgggcgcctcctgggtcctttttataatgccggtacaccagcacaaacgcatacagcagcaccggcagcagcaccgccacaccgatggctgcccggaaccaggcccctgcctcctctccttttccaaaggcaaagaccaggggaaggagggctgccgcacacaccaggatcactcctgcccatgctaaaattcgtttccagtttttcattctcttactcctcttaataaagctcataagcccgcttcagctgcccatcccctcacttaggaggggcttggcagctttttttgcatccctttatttctgatttgtgcccttcaggaacttctcctcataggcgtccagaagctttttcaaaagctctggggctttgccgcccactggtttttcgtcaatgacagatgcgggatgaagaagggctccggaacggctgacaatgacctcatctgcctcaaaaagctctgtcagggtaaaggcttcttcctttaccggaatattttcctggcgggcaatctccagcatgtgctttctagtgatccctggaaggatgagattgtccagaggcgctgtgcgaagaaccccgtccttgatgatagagatgttgctgtgggcacactctgtcacccggtctcctctgtggaaaacggtttcctgacagcctgcctcctcagctctctgggcagcgatcacattggggatcagattcaaggtcttaatgttgcagtggaaatatcgggtgtcttccatggtgatgagctttaccgtttcctccatgggcgccggatgaatgggattgagcatgatcataagattgggctttacgctcttagccggaaaattgtgtccccggtaggcagtccctctggaagcctgccagtacaaaaggccctgtggggcgtcaaaggcctcgatcacccggtaaagctcccttgtgagctcttctctgtccatatgaaaaggaatttccaaaagccggcagctattgtagaagcggtccaaatgctcctcaagggcaaagggcatcttgtttgccacagaggtggcgtcatagaccccatccccgaaatacactgctctgtccagaaccgggatcttcagctcctccacaggagcgatctcaccattataatatcctacacgttccataaaattctctcctttatataagggttggggacactataagcgcccccattcctgtgtgattttttataggtttctgtaaataatgtcgtctcttcccggtccgttggagatcatggtgatggggaagcccagcttctcctccacaaactccacatattttctgcagttttccggaaggtcctcatattttttgatcccgcggatgtcacaattccatccaggaagcacctcaagtacaggctttgccttttccagaagggctgtggtggggaattccgtggtaacttttccatcgatctcatagccagtgcatacagggatctccttcagatagcccagcacatccagaacagtgaaggccacgtctgtggttccctgaatgcggcagccatacttggaagccacacagtcaaaccatcccatacggcggggacgtcctgtggtagccccatactcaccgccgtctcctccccggcggcgaagctcatcagcctcatccccgaagatttctgaaacaaatgctcctgcgcccacagcactggaatacgctttgcacacagtgatgatcttcttgatctcatagggaggaacccctgctccaatggcgccgtaggcagccagggtggaggaagaggtgaccatgggatatattccgtggtccggatcctttaaggagccaagctggccctccagaaggagttcttttccttccttcagtgcattccacagatacagagatacatcacacacataaggctccaccattttcttgtattccataagctctgcaaaaagctcctccgggtttagaagaggcttgtgatacagatgctccagaagcacattctttgtctcacacacagcgcgcagcttttccataagagaagcctggtcaaaaagctcacttacctggaagccgatctttgcatatttgtcagagtagaagggagcgatgccgctctttgtggagccaaaggattttcctgccagacgctcctcctcatactggtcaaataagatgtggtagggcattaccatctgtgcccggtcagagataagaatcttgggtgccggaacccctctgctgactacttcgttgtattctttgaaaaacacgggaatattcagtgccacaccattgccgatcacactggtggtatgaccatagaacacaccggatggcagggtgtggagggcaaatttcccgtaattattaacaatggtgtgtcccgcatttgcaccgccctggaatctgacgatgatatctgcctcctgggccagcatatcggttatttttccttttccctcatcgccccagttcgctcctactactgctttaatcataacactttttcctcctcgtgtttcattgttttcctgtatatccaacctttaccagcttccgccgcctccaccgccgaagccgccccctgagaagccgcctccgcctccggagaagcctccggtaaagccgcctgtgcttcccccggaagagcctgatgccttcacaggctctgcaatggtgagagctgtggacacggcagtcatatttctcataaaggaatgatggaagccatagaaattcatcgttccataatttatatcatatcctgcataccattgaggtgcaggaagggcaagtccttccagcttcttggcaaacacatccgaaagcccgaacacataggtgtagggaagaatgtggtagaaccactggggattctcctctgccatagccttgagcctgtccagctctgcggtctctatgaaatcccggagccccaccagccttcccatccagtccacgcactggtccgtgcgctttttcataaatccggtgagaagcaccatgagagccgttccccctactgttaccacaaggggaatggtcagatcaaagacctcctggtaatgaagctgggtgaaatagctgcctgcaaatcctgcacaggcggccaaggtcagccccacgcccatggcggcctggcctctgcgggtcccagattgtccggtataccagttgtccaccacatagtcaaacagacataccccagccagaaggagaaccaaggtaaaaacataaaagatgatccgcagagggctcagctttgaataatttcctaaaaggatcaagaacatccccattggaagcagacacagcacagagctgacgcctctggctattttcgaggctctggtatacaggcctcccctgctttccacaaatgccttcaccgaggtctttgccacggtcatggtgctggagaagtggtatttcagggaacttaaggacaccctgtctccgccctggaagattctgcgaaacaccacctgtgcatactggggtgcatccgtgggcagctcacttaatttaataaagtagagctttcccttcttaggctcctccattttcagatagcccttgtctgcccagtatatgatcagagaaagcacgtccttatcctgaacgccgccgtcaataatataacccacggccgcactgtccagaccctgcggaggctggaactgaatggagggaatgatcttctcgtctcttccaaataatagaaacagcatcccggtgaccaagatcatcactgcggaaaaagccgtgagcagaatatcgatcctgggaatggtgtgggtctgggtaaaataatctgcccccatatccccaaagaccgtaatgccgctgccataggggagctcccgggtgagctgtcctttcagggtattgccgctccagctggtctccagaatgtgctctccctcattcgtggaaccatagccaccataaaagagcttcagcttattgtgattaaaatccttggggaaggtgatggaaaagccgcttccctccggaagattgttctgccaggtcatggggagcaggctgtaatacacatggctgtagcctgctttttgaaaccggggagtgagcttatagctgatcttgtacacctgacggccgtacacctctttattttcacttcccagacgcatgacaaaataaccgttttccttctccttatgaaccggcgcactggcactgatcacctgaatatctgcataatagggaactttctctgtctcaccctttgtactattctttttataagtctcgctgaatcccttcatgggaatataacggtaaatgccgtgcttgtctgtaagaaaatcaacggtgatggtctccgtgaccgtgtaggagttgtcctcccccactaccacatccgtctgataattctccgtgtacatatctccatcataggtgagctctgcgctgaccggagtgatcttctcaataaaaaccgaggatgcgaaaaacagtagaataaaaatccataaaataccttgtaatccttttttcatatatgttcccctatatccctgctaaaaggacactttcacattatccctctgggaatctgtctctacctcgtacaaaggctttctctgaaagccaaagactgcagccagaatatttccagggaacatttcggtcttggtattatatttatttaccacaccgttgtaataccgtctggagcctgcgatctcttcctccactcttgccagctggtcctgcatacgcacaaagctttcattggccttcagatccgggtaggcttccgtgagggcaaaaagagattttaaggttccgtttaatgcgttgtcacttgcgatcttatcttccggagacctggctgtgatggcctggtttctggccttgatcactgcctccagggtctccttttcatgtctggcatagcctttcaccgtctccacataattggggatcaggtcatacctctttttcagagacacatccatggcagaaaaggcctcctcggtcttgttccgcagcttaataaagccgttgtaggagctcaccagccacacaaccagaagaatgatcaccacaagcacaaataataatagtttccataacatgggcagacctccttcttacacgttgatctctgccttcactcccagcagctctttgtgctcctcaagaacaggagctgccaccttggcgagaaatgcctctgtctgttccttggcacggcctgtatattttgccggatccatggttttcttcagctcctctaaggtgagattaaaggccggatctgctgcgatgagctccagaagattgttctccttgccctccgccttcacattcctgcctgcctccatggaaagctcacggatcttctcgtgaagctcctggcggtctcctcctgccttcactgcatccatcataatgttctccgttgccatgaagggcagctcggacatgaggcgcttctcaatgaccttgggatataccaccaggccgtccaccacgttcaggcacagatccaggatcccgtcaatggccagaaagccctcgggaatactcagacgcttgtttgcagaatcgtccagggttctctcaaaccactgggttgctgaggtgatggcaggattcagcgcatccaccatcacatatctggacagagaagcgatcctctcacttctcattgggtttctcttgtaagccattgcggaagaaccgatctggctcttctcaaagggctcctccacttccttcagatgctgaagaaggcggatgtcattggacatcttatgagcactggcagcaatgccggccagaacgtttaatactctggtatctacttttctggaataggtctgtccagacaccggataacactgctcaaagcccattttttctgcgatcataggatcgatcttgtcaatggtctcctggtctccgtcaaagagctccagaaagcttgcctgggttcctgtggttcccttggagcccagaagcttcaggcttcccattacatattccagatcctccagatccatgagaaattcctgtgcccacaaggtggcacgttttcccactgtggtgggctgtgccggctgaaaatgggtgaaggccagggttggctgcgccttgtaggtgtctgcaaacttggacagctcggcgatcacattcaccagcttcttctgaaccagcctaagggcctcacgcatcacaattatatccgtgttgtcccccacatagcaggaggtggctcccagatggatgatgcccttggccttagggcactgtaccccgtaggcgtatacatgggacatcacatcatgacgcacctggcgttcccgctccctggccacatcataattaatatcctctgcatgggccttcagttcctggatctgctcctgggtaatgttcaggcccagctccttctcggtctctgcaagggcgatccatagtcttctccaggtacggaatttcatatccggagagaagatgtactgcatttccttgctggcatagcgttcggataagggactttgatatctgtctgtactcatgatgattctcctgtcttttattctaatcctaaacgatggaaaacttcattgtaagcttcttccacatttcccatatctcttctgaaacggtccttgtccagcttttcgttggtgtgtacatcccagagacggcaggtgtcgggagaaacctcgtcagccagaaggatctcaccgtggaaacgtccgaattcgatcttaaagtcaatgagcttgagatctgcattcaggaaataggctttcatgatctcatttacttttaaggtatattctctgatcttatccagctcttctcttgtggcaaggcccagagccagagcataatcatcattgatgaaggggtcgcccagatcatcgtttttatagctgaattccagaattgggcagagcagctctcttccttcttccacgcccatgcgtttggaaaagcttcctgctgccacgttgcgcacgatcacctctaagggaacaatgtcaacttttttcacagcagtctctctgtcatttaactctttaatgagatgggtggggatccctgcctcctcaaatttctgaaacaccaggttggtcatacggttgttgatggcgccttttccctgaatggtgcccttcttctctccgttaaaggcagttgcatcatccttgtagctgacgatcacaacatccggatcctcagttgcataaaccttctttgcttttccttcatagagctgttctcttttttccatttctgttcacctagtcctttccaattttcttctgttttcctaaaaacaggagtaggtggaaaaatcaatttccacctgtatcttcacatattcctagaaaattatataacaaggttcctttaaaagcaaccacaaaaatccccccgggaatcacagcccttggtggaatttgcctaaaaattctttcatacgggtgttgtctgcccggaagacattttccggggttccctccacagcaataacgccctggtccatgaagatgatccggtcagaaatatccctggcaaaattcatttcatgggtgacgatcaccatggtgatatgctccgctgccagatcccggatgacctttagaatctccccggtgagctccggatccagcgctgaggtaggctcatcgaaaaagaggatcttgggattcatacacagagccctggcaatggaaactctctgctgctgtcctcccgagagctggaagggataggccttctccttgtcggaaagccccatctgggccaggagctttcgagcctgagccacggcatcctccttcttccgcttctgaaccttcatgggcgcatcaatgagatttttcagcacattgtaatggggaaaaaggttaaaattctggaagaccagccccacctctccctccttgcggatctctccctcatcaggggtttccaggccggtggcacatcttaataaggtagattttcctgagccggaggggccgataatgctcagcacctccccctcctccaccgtgagggagattcctttgagcacctccaggtccccaaagctcttttttatatttctcatctcaaataatttcatgggaactctctcctatctgtaatagctgagttttttctcaagtttatccatgatcactgccacgatcaggttaaacacatagtagaaaacagcggcaatgacaaagggcatcatggtcgtctgggagctggcgatctgtttggcaatggtgaacatttccgacactgccagcacaaaggccagagacgtgtccttgaccagggtgatcacctcattggtgacagagggcaggatccgcttgatcacctggggcaggataatgtagaaaaaggtctgggctttgttgtagcctaagatttttgccgcctcatactggcccacagagatggattcaatgcctcctctgtaaatctcggcaaagtaagccgcatagttaatgccaaaaccgatgaaaacggctgtgaggctgtaagccatggagatcctcactccgaacaaaaaataggggccgaaatacaccaccatgagctgaagcattaagggtgtcccccgcatgatggatatgtaggctgtggtgatcccccgtataatgggatttttcgccatcctgccaaaacagataagaagccccaggggcagagacaccaccagggtcaccaagaaaatttctgtggataccagcatacctcctgccagctgccggagcatgacacttagattcattgtatttcctcctgattttttctataacgtgaagaaaagagggtgcagtgtgtgtaccctctgttctcctattcttctttccaaagcctggcggcggccagggctttcttgttcacttttcttcctttattattctgcgtcagcagcttcctcttctgcctctgcctcttctgtatcagcggcttccttctggtcttcctgggcctggtcaccggcgatgcagatcatgtttgcatcaatatcatatttttcggccagctcttctaccttgccttcttcgtagagcttttcaacctctgcccacacctggtccttgagctcgtcatttcccttcttgaagccgatgccatactgctcgctctggatcggctcgtccaggatcacgtactttccttcatctctctgggccagctggtatttggcaacaccgatatccactgccactgcctgggcagcaccggagtcaattctcataaatgcggtattataatccggaacctctgtgagagatttaaagctgtctgtaagtgctttgttatcgtcgttgttcagagcatccagggcagcggaagcggcctgcaccagcacatccttgtcagccaggtcttccagcttctcgattccagcatctgcggcaactacgatcacctgctcgttgttcagataaggatctgaccaggtatagtcgtcctctctgccattaatggtaaatccgttccaaatacagtcaatggtgccggaattcagctccatgtccttggaatcccagttcactggtttcttctccagggtccagcccaggttgtcacacaccatctgtgccagatccaggtcaaagcccacatactctccgttgtcatccatatatccaaaaggaggatattctgcgtcaaatcccacgataaatgtcttgtcgtcatctgcaagaaccggcaccgccatacttcccgccataattgccgccaacaccattgccaatgcttttttcttcataccttcttctcctctattatttgttttttattatttttcatattatcacgtagtcactctaccacgtgaaagtatcgtatcataaagaaagggttgtgtcaagctattttcacacaaccccagacaatttttgttctccacagacggacaaataccagcaggccggactctttatcacgagcctgtacttctgtggtactcctttgtgagcttctccatgatcccctccacctgatgctcatacacaggtatctcaggactgtcctcaaaggccttctgctcaagctccatctctcttttcgtctccttgtccacccccagctgggacagacggtcctcatattctatgggggtatgcaccctggaataggcaaaaaggtagctttttaaggattccttggtgtggagaattccgtaggccctccagaagcactccagagcctggtccatctgaaataaataggcatggacacagcccaggttgttccacacagctcccacaaagccgtcccgcatttcctccaggtcatcccgctccagcacttgtctgtaagcctcaatggcccccatatacatgccgttttccaccagactgtccccttttcgcttgagacgcactgtggggagctccttgtcgaatttctccagctggatgttcagggcccgcagctcttcataatttaagtaattgatttctttgaaaacagggtacatgatatcttccgcactggaaaatttacccagaactgggcgcagcttggccgccagggcagggagctccagctcctcctccagccatttgcacagattctcattaataatgctctggtcaatgagataaatattgtgatacagatagtagcacaactcctctatggtatagatattcgtaccgatattttctataaagtacggattctccgcctttttcgtctgacacaaaatatagccgctcatgctctcctcctaccactggccgcccgttcacctgctgccagcaactaccattgtacgctctctttccagacctttccgcttgaagggaacagatctccaaaccccagatcctgcacagtgatctcacagtccttaggggattggtatgccaggctcacatgcagcctggtggtgcggttgggccggacaggaagccccggaagggccatagccacccgcttcttgccgctctcccccatgggattcaccacaaataccagctcctgggtgttgtccaggatcagctcatattccgccctgcactcataccagttccgccctgcctcaatgaggggataatatgctggagatcccatgatcatcatatccatccccacattctcagtgaccagggattcactcacatacaggtaatttttcagcttcttctcctccaggcgttccctggctgcagcacaggcccccctggcaaacagattgtttccaaaaaagaccctccggtgctggcggcacaaagccttcacagacttctgggcccaggtctggtcaaagccctccccagtgagaagaacgctggaatacaggtctgtttttaaggtttcctggataaattgataaaactgaaggtctctttcaaccgggtctgtatccagcccggtactcacctttggctccagccgtaccagaaccggcttggtggaaatattcatggacagacggcaaaaagccacactctctggctggaaagcataccagcccacataccggttccaggtctcctgtttctggcacagggcataataatagaagctctctccataatctaagatcaaaaactgatccttgcgaaatcccagacttgcgcaagcctcctgaaggtttgccaccagggtccggtccagcacaggcacagccacagccatgcatttaatattccttacaggctccgccattcccagaaacttcagcatcccctgaaagaaaacagcaagaagtgcagcaggcgtcatctcctggtctcccagggtgaccggctcctgctttaagcagcgctcatagaggtcctccaccagaagtcctccctgttcttttgcaaaatactctgcctccaggcctacgcagaactcatcccggtcttgccttttgcacacataggtaggggcctcatactggttggtccccaccttcatggaaatggacaaagcctcctctgcttttctgtcaaaataacagatctgtgaagtttcttttccaaaatctaccccgattagaatgtctcgaatttcgttcatattacagttccttctctatggtaaaaatacgtttcatatattgctcctggcggagatactcctgaagcagtctggccgcctgaggccccttatacagcttccaggaggacaggatccgattcagcagctcatacttgctgccctgctccgtgtctgtccggctcatggtgaaggtcttcaccggagatttctttttctctcccctgtactcctccgtgaaataatactccagggtctcaccgtagaacaaggtgaaggtcttcaaaaataccccttcgtacacacagcgcaccggctcagatttaaactccttagaagtgtcaaagcctgtatccagacgatagtgaagaaccaccttagcctcaggggccgcccgatcttccacaaaggtcttgtcctccagctggtacaacgccaaaattcgtgtaggaagctttctgaaaaatccaaaagccagttttttctggacacattcccctaaaatttccttcacaagctcctcctggttttcactgaggcttttcttgccggaataaagcttcagcagagccagcctgcacacaagatccagatcccactcccttaaacaggcagttttcaggcaggtctccatataggccggcatctcatggccatgaataaaatatccgtaggatacaaaggtgagataagccatcaccaccttttccttcccggtctggcgcacataattctggaagacctccccgcccttgatcctgtaatcccaggtatacatcagtgtttccaggatccgctcctccagctgataagtatccagccggaagctcctggcactgtcccacagacagatcaggtcatccacaggaccgttcacatatttcatccggtaggtgaggagaacatcgtcaaactttccgccctggtatacatagccagaaagatacagcagctcctcatcctcttcaaattctcttttgatgatcagacggcttaccagcttcagaagcttatccagactcacaccctcacagcccacatcccggatcaagccataggcctggtcgtaaagtcctgtgtcaataaggatttccagcagctttttcttgtccacctgggcaaaggtctcatatttcatggtccttaagctgtcctccacggcctcctggtccaggtggcactggtaatagtcaagaagctccttgcggatctgtctttggtaatcctctgtaaaagactccagacctgcaagtatctggtacagctccagattttcctcacacacaggccgcttcttgcaggcatgcaaaagcagtcccggctgggccacccccagctccagacactttcctgcagcctccttttcatccagcagcttcttcagattgtaatccacggtggaggcataccggatctgccggtcatcctgaaacaagatcatagcatcctgggtataaatcctgggataagccactccgtggatacaaggatagatctcctccttggcgatctggctgtgacgcacgatcaccgtgcggatcttaggatcatcacaatacagcctgcaggcaaaaagcaccctggccacatcgttgccctcctccatggttttgggattcagacacagctcctggtaaataactgcataatcctcattgatcttctctttcgccagcttctgggcggcaaattcttccatgctctccttatagctttcatacacctggggctctttctccttgttggcaataatattggcaaagagaaaggctctgcgggtatcacttaaggaattattgttgtacgcaaaatatagaagcagtgttctgggcagcactctttgatgggaggtatccagcgtctccatataatattcataaagcctggtaagacgcagccctctctccaccgccagggaaaaccacttaaaatactccctgtcaacaggatttcccttcataatatatttgcacacagcctccagcgcgtcatctgagggataggcctcataagcataggccagggcgcggtacaaacttctggaaaaattcttctcatagccggacaaataagccagccgcatgctctgctcctgggtgagaagctgttctctgcctgcgaacaaaaatacctgggtccaaagtccgctcactcttctcaagagattgatattcttagaaatgagattccaggcctccagataaagcagaggactgcagcagcccttgtcaaaaagctcctccatggcaaaggccagctgggagggattgctttgcatctcctcatccagtgaggtccaggcccagaaaaggagaaagctgtcttccttctggtggtagaaattgtgaagcctctggaccacctgggacttatcccggaaaatccccagcctgctgcatagatacacatagatgccggcgaattccaggtcccctttggtaaaggtcttgtcctgatatttttttataatctccagggccgccttgggattctcctcctggtactccacataggcttcatatatctgatactcgggataatcctgcccagaagccttcaattcccgcaaaatctcctgtgtccgggaaagccaggtcttgtagtccagcttatggcaccgaagcgcaaggtaatccttcaccagcttcacccggcatcttctttccgcctgcgcagcccccgcaggaatcttctttgtgacagaggccgccacctgaaagaccagctcctgataaggacccttgagacggatacgtcccagattttttccttttcccagcttgtcctttcgtatgacaaaattcagatggtagagacttccaatgaaatcttcttctgtgatggttctcttagtaacctccagaaaattcccttctgtctccacctccagaaacaaatgcccccagccatccttctggactgcggcaaattcctggatggattcctttatgtcataatattcaatccgttcttccttcagccgtacacccactcgttccttgcagcccatgcccaccagaaactcctccagatgctggtaggtcaccggattctgagccatgccaagatacatggcccgctctttctctgtcagtgtggcaaagacaggtgcaaaggcctggggatggcagaaaatccggaaggcttcccgaaaatcattttttgccagattcgtaaattcctccatggaggtaatctcccccacgcaggtctgaatctgttccctggcaatggcaacagaaacaggaatggaggcttccccgatactggtggtaagatacagcttgccattcacctgctctccaggctttagtcctgccgtatccacaccatagacaaaggtcaccccattcccgctgaaacggtccatattcactaatattcttcggttgtcggatataagataaccccggatcttcctgttgtcagaagcccccagagagatttctccctgtaggttctgcccttgcttcactgtctcactgatctggtccctggacaggatcaaagccggggggtcatattcaaattttccattaataatctgctctaatcttcttttcaaaactgtcacctgtggtccttgactaatcttgcagctactcgctataatggattatacactattttgtcaaaaatgcatactaaaaatcttagaaatgctgtttgaatagaattcaaaggttccttttcccccatagaaaaggatagattttaaagagaggcagggatccctattgaaaccacagatagaatttcacggaagtgatctggagaagatccaggaaatctacaagatacccgctgaagagatcatcaccttcggagccaatgtaaaccccctgggaatttccccgaaaatccgggaagcgctcagctgccatctggacgccatcacccgctatcctgaccggaactataaaaagctccgggaagccatcggcggctatgtgaaggcctcaccagagcatattatggtgggaaacggctgtacagagctgatctccttatttttaaaaacaaggctgcccaggcgcgccttgatcctgggccccacctattccgaataccagcgggcaattctgctgaacggcggcacctgtgaatacgcagctctggaagaaccaaaagatttctgtctggacattcccttgttcctggataagctcaccaaggattatgacctgctggtgatctgcaatcccaacaatcccacctccacagggatcagcacccaggacatggagaaaatcctggggcactgccaggcattggacatctttgtgatgatcgatgagacctatgcagaattttccccagaccactgccccgtatccgccatcccactggctgcctcctatgacaacttcatggttctccggggaacctccaagtttttcgcagcgccggggctccgcctgggttatggggtcagcggaaatctgtccctcctgaaaaagatcaaagaaaagcaggacccctggtccaccaacagccttgcggaggcggcaggctgtgtgatgttttctgatgaggattatatccgccgcaccaagaccctgatcaccacagaacgggaacgacttatgaaggagctgtcctcctggccctccctgaaggtatatccggccatggccaatttccttctgctgaaaattcaaaagcccggagttacggcccaccaggttttcgaacactgcatccgaaagggacttatgatccgggactgctccacattccccggactggaggagcatttctttaggttctgtatcatgcttccatgggaaaatgacaggcttctggacacactcagggaaattctgctgtaaaagcttacaaaggagttaagaaaagacatgaataaaagcagcaaaatctggcacactgccgcaactcttgtattgatcggtcttcttctcatgggaggcgtcctgtttctgaacaaaactgccagctatgaaagtattggatggaacaaagagatcctgcacaccaattatgattcttgtctcaactgtgaaaagcagggcttcacattcacccagactggggaggaccctcagatactttttaccggcatgaaggacacctatagcggggttcagcttcgtctggcccagcctctgcccctggacacagaagttcagatttattgggctaaagcaggtgccttccgggagtttgactctcacacagagcttgtcaaacagggccagaacgtgatcaccctccccatcaaaaaaggccagtgggacactctgcgcctggatctagacacagactatgagctccaggaattttccctggcagagaaggtgaagacttcctattctctttcccgtgaggatcttcccaagatccttctggaatgctttgttctgctgtctgtctatgtggccgccctggctgcccacaaatacaaaagccaaggaagaaaggattaccttccctccctgctgggccggccttcttcaaagaggaattatgcctatgactaccttcgggtgcttgggcttgtgatggttctgtgtacccatgtggtccagcaggacatgggcctgctcacagacccagggcagatatattttatgaagcttctatacaccctgtgtctgggctgtaatttgatctactttatgatcagcggcgcccttctgcttccttataaggaagaaaagctgtcctatttttacatacaccgggtcacccgggtggccctgcccatgattttgtattatctgttttccatgggggattacatcctccagtccgaaagtctgggcaggggcatcctccttcggttccgggagctgttgtcaggaaatacaccagaggctcctcattactggttcttttatgagctcctgtgcttctactttgtgatcccctttttccgctatctgttcagggacatgagctaccgcatgctcactaaatttgcaggggtgatcctggtccttatgacagcctctgcctatattccccttgtggcaggaaagtttgcattgtccggctttattaattcctggttcggagtggtgatcctgggttattggctgtcccagaaggagacccgcagatatgacagaaccctggtgatgctgggaggggcgtctgtgatcgtgacagccctgtggatccgccagagggaagattttcttccctacaccaccgcaacagcccccaccatggtattcttctgctgtgccttgttcgtactggcctgccgctatgagaagaagctttccggaaaaaacgtggtggtgaactttctttccaaatatagctattccatgatccttatccactggtgggtcatgttccatgtaatctatggaaaattcgatctccatataaacagcctgccctttctgggactggggatagctgctgtcatagctgtaaccctggctgtgtgcggggtaaccgcctttgtcatggacaatcttgtggtggtgaccgtggagacagcggtgaccaccgtgctgaatttcctagtcgcccagtgccgccggctgccagtaaaaataagtccttaaatagttcagagcctgcaggaaactccccgcaggctctgttactgccacaaccgttcaatcctggtcaggcagtggtttacctatgccccttcataagacatctgattttgtttagaattatataaaaacaaatctgtacaaagccaaaataccacatgacaaaattcaaatgtgtatgcacgtaagaatggcttttggccagaacaagccaggacaggcctgtgaaaaagaaaaccagatacaggatcagctcttccacactcagctgtttcttcacataatcgtataaaaagatgatcacgggcagcaggcagagcaaggggaattgatttgcatccacacctgggaccacatctgtctcaaaatgaaaatatttcttcactgtgtcccacacagacccattgatagattcccagaacttaggatcaaaattatttagattcccaccgcccacacgcctgaggacatctttatttataatactttttataccctcaataatatttccgtctccccttaaggatgcatgcatacaaatggctgtaaaaaatcctgccagagccaaaattcccatgataaaaatcgtgcgaaataacagccgggctttctgcctgtcttttcttaaaactgccagcagccagtcagccagcagaaaagcgatcatgccaagcatcacggttgtaatatattcatatccgcacaaggattttcctgtgacggaaatgtacactcccgcataacaggccacacgcacccatttcttgttcatccatatggcacacaccaatcctataagcatgggcaaaaaccaggtaaattcaacccagtatatgcttcctgcaaaattaacgatccagggagacaaaagaaacgtagtcccaaaacaaaaggccagcaaaaaattgtacttgacccctgccagcatggtgatcatggtcaacacaactgcagcggcaccacaacacagcaaggtaagaatatccaaatactgatcttctcccataaatctggccagatgacgaaacaccttcccctgcagtccatactgagaatcatatacttttaaataccccgggggatatttcgtctgtgttcccccttctgtggaatagaaggcggccttgtctaattccccatacttataataattcagaggcttctcagaatccagggtgagaatatagttttcccccttggcttcaacctgggtgatgggaaaggaatccccgttttcaaactgaatgatagtgcctgcagccgcaaacttcttggtatagatgttttttgatatcaggatctttggctctgttttgctatatccataggtccaatcatcatcatttcggaaactgactcgatagggcacgtggtctccctttgcagtattgtatctccccaaactatacttatttaaaggagtgccggatttttccgcctcaatgggtcctgccacaagacagtctgagtcctgctgaaaccttgaaaaagtctctgcattttccacatcaaaggaattaaacataaaattccaggaaaacaccgttgtaagacataggaacaacgccccagtccttgccgccttccttttttcagctgcgcacagacacagctctccaaggagaaacagccagatggaaaggaagagcaggaaaatcagtaccttttctgtacttgtaaaggtggattgagaataagcatatcctataagaagattgttcccctgcccttctggctgaagatagctgttctctaccaatgggagctgtggtgcggtggtatcgtctgcggcatctatcaccagcttatattccgtacctttctgatagcctcccttggcatataccatataccaggaagcctccttcatttcgcccacatccacttccatggtctcaatcctttttcccccgcctgtataggtggaaaggatcagtgttcccgcctcttcttccggaagggtagttaaaattatttcaaatcctgcaaaatgatcctctgccggaataaatactgtctcataaggtcccttggccagatccaccgtccccatccggtcctctttatcaatatcgtcataggcagccgcatcacaataaaagccatgagaaaaataatccatgggaatgatcaaaatcagcagcacaatcatcaccactgtgacagcggcaaatattttcttatttaacccaatttttttaatagttgtcataaaccgctccataacccgcttgtgttttatttcagctccttgggcttataagctcccatgagatttttgaaaagaatcttcagcagctcactgtttcccttaaaaaagctgatcttggtgggagtttttcccgccgggggataggccctggtcacagggatctcacaggctttcattccaagctgggtggcccgcacagacaaataggccaacagctcataggtcataaaaatatcccgcagaggctgtaccctctcatccttgagatacttcatggaataggcccggtaagcgtttgtggtatctgtaaatctctgaccagccgtaagagaaatgacaggtgcatggatgagcttcacagacacggttcttacaaaaggtgtgttcactgccctgcctcccttgataaaccgggagccctgaatgagatcatacccctgcttcagcttctcaataaatctgggaacatcctcaatgctgtccttattgtttccatctatggtgataacgcctttgtatccacgctgcatagcccaccagatgcccatacgaagctgagctccctgtttaccctcatcttgttttaccagcagggtatttacctgaagctttctgagtatcgtttccctggtgcagccgtcactggaccctccgtcacagataacaagatctgcatggtctgacacatgatgcttttttgctctttgaagctctctgtggatccgctccccttcattgataatgggtatgagaaccacatactccttgttcttgccagcaaattcctggcacacaaacttaggcacacctgcctgcttctcatagatcatgccgccgtctcccttatatacttcatggtttcttccagcaccccaagctcctcctgtttacccatttcaatagacacaaagccatcatactgctctgccgccagcagatcaaacagctccgtgtgcaggcttctcttctcaatgggctttaatccaggctcactgatatgcacatgatttacatattttacatttcccttcagaagactcacctgctcctcattgtggatcatcgtccccgtgtccaggttcagtaaaaagccctgggagtccacctgcctgatcagtgcaagtgctgctttggtatcattgatatagttggtattatagatgggcggattggcctccatggcaagggcgcatcctcttgcagccgcatactcaccaagttcccggaaaaagcagacagcggtttctggatcgtccctttgggtgatcacccggtttctgggacagccaaacacaagattcccacaccccactgcctgggcgaaatcaatccctttctttgtatagtccagaagggcctgccgctcttcctgggtgccgaacagcttttcctgtctgccaaaccagatggactgcatggaagacacccaaaagccatacctgctcttcacctcctggctccactgtctggcctgctccagctgttggtagggctgctgaggaaaaatcctggtgggggcgatctccagccccaaaaagccatactttttcatgagcccgtacacctgctcatcctgctgctgtgtccacgcaatattggaaatcgaaagcttcatcacaatgctcctcctacaaatcctttgatatcttccaaaacctcttccttactcatcaggtatccgtccctgcctccgaaaagctctgcatatctgctcctataatcataataggctggctgtggggaaatttcattgataaaaggctctcctgtcagggcttcatacacctctttggcagacacaggctctgttgcgggatgccacagcttcagatcattttttaaggcagtctgaatatcctcccacagtctggacaatggatagaactggtacacactgcggctgtcggtaaagtgaagggcagtaaacccaagctcccggaaccttgtcttcagaaactgcttttcctcttgtgtcagcgccccacatttataaaaaccgtttggctgcagcttataatactccctaagctccccggcctgggcacataactggtcaaacttatcttttttcagcataaagggaatcacgtttatatagtcgtagataaaattcttcttaatattgattccatataagcccggcaggcggatgatcagtgcctggggatactgctctctcacccactgctccaaacggtaccggttcaggccatagggatgcagatcctcacagtcaatctgggaagcctcatccttgccttgcggctctttaaatacatcgatggtggagatcagcaccagattcttgggattgatcctggaaatattcttctgtgcctcatagatcaattccatgtctgcctcagggtttgtgttggcaagatacttttccgcccgcattcccgcatatatgagaagatccgggctggtcccataggcttcctggatatttttcgaattataagccctgtcaattgtgccttttgcataaatattacttcccacaaaaccggtatatcctactaaagctatcatctgattttctctcccttttttagtgtaactgtcaccatgaatacaaacaatgttacaagattaatgggccagtaatatctgaaatccgaccaccctgtggtcaaaacaagagacagtacatggcctccgcaaggaataaacacaagaaggatcctcttgtccacctttttccacagcatgaccagaataagtaccgtactgagcaaaaaccatattccgctgcgccattcaattacatttaatatgggattgtccctggaagacgttacatattccttcatacgctctgtaataaaattctccgttctggccggccaataacgattccagtccgggatgtcatcctgggtctttgtaaatgtcacacagcctagtttaccgttttctcccatgaaaatatcccatactgcatcctgcctgcacatgatcgtccgcgtcatcaggattggatttcttataaaggtgtccagataggccttgataaactgccccttggtcacatccagatcataggaggcctcggaccaatagggggaatattgatacccttgcatgtcagaattggaaagaacattgatcatttccatggtttcctctgacacagtcccgccattataatagacccccatgatatcttgtcccaaaccaatatactcacctccattgggatttctctcaacctggatataatcgtataatggaaattctaccactaacaccaacagaaatgcaatcccaattgatgcccataccttccagtttcttcgaaagacaagaaccagcacaacacttaccaataaatacggaacaataccgttctgtctgaaatagcaggtacatacaagtgcggttgcaagctctgcgtacagataccatttacttttcggattgtcaaaaagataatgagcggtgatcaccgtaagccacaagatgcagatggtatatgggatatccttccatatggttgtgagataaagcatgtttccgcaattcagagtagtaaagatggtcactgccacgatccaccctgatgaaatgccttttttatagagaagtgccattcctcttaaatacacataggcgaaaaacaggtactgaacaaccaccactgcatagacagagggcacaatttttaaaattgccttcagccatagaatataaaagggtggatgccagttaatgatgccccttatggaatttaccgcgtaccccatacagtaagtggtgtccggtgacgaaatggctggattaaaaccccttacaaaaaacaaagagcccgccccaaaaattcccagacagcccagtatcagaatgaacggcatttttccgttcttgttatttacctttttttcagatgggccgtctatggttttcacaagccataaaatcataggcatcacccatactgccgtgaggacaaagatgccaactgctccagccgtgatatgcatatgtataggataaataaagcatctgctgcccactagcgaaaacgccgcccatccagacacaatgcccaggcctgcttttttccagggggtatcaacataggctcttaacagctgcacattcttttccgcccaatttccggctaaaaatgccaggcctgacaggagcgccccgatctccgattctagctccagtccggaagcctcaatggtaaaaaacgccagaacccccatcaaaatactaaatacccttacggtccttatattttcagccagcttccgcagcctatctgtgcatacttcataaatggctgcagacttcagtaccagaaccatacatccggccgccagcagcaaaacataaatggagcacaaaagcttatccatgggtgtcagattgtctgaataaccataagaaattacaggcagggaattctcctgggatgtataatgcatttcaggtatggtattggtatttaaagttgagatcttaattacgtaggattcctctttctgtacacttaacatggtaccaaaggtcacccagcggttcaccttcatatctgcataatccctgcagcctctgtaaaggagacggtctttgtggtacacctctatggccagggttccctccaccgttcctttgtcatctgtgggaagagaggacatggacactctgatattctccagcatcttagcctgaggggtgaatttgattgaaacagcatcagccggccccacagccttctctcttaggattttattatcagccgtataagtgacaggctccttaaaacaattgaaaacattgatttccagcaaacatatagccgcaatgaccagtacaatgcagcagactattttttgtattttatttgttactttcacggttcccatttacttacaatcctttagttcgtcagtttttcaatactctcaaagctgtatctcttccttttaaaaacaaggtccactaagatctgcagatatttgatgatcacggttagtattgcaaataatccaaaaaagcagaaggacagaaacaaaatcgtggtagtccagcctgccaccgggttccccaaaatatagatgaccagagagtatatggccataaaaaccgttgtcaagatcatgagggatgtcatagttatggaaaacccatatcccacctgagtaaaaagaatcagggaatctattgccaatgaggatctgtacttcttttcttttttgtccgtcttgttccccacagagattgcagggatcacctgatactggagcgtatctgtctttaagccgcagtttgcatagattgcctttctgtagggcacagccttattcatgctgctgatccggttgatcactctgcggctgaggatccgaaagctctccgtattcattttataggacagctccgtaaacctgtcaaaaacagaataaaataaacgcgaggaaaccttctgtctctgatccggagaggcacttacaatatcatacccctgcaaagaacgccggtaaatcttcataatctcacttttatcaaaatccctcacagtggtgtcaaactcgaacacaaagtctccaatggccaggtccacacctgcattcatggccgtctcaagcccatgatagtagctcatattaaggattgaaatatttgtggaaaccgcttttttcccaagctcacggatcttttccgtgctcttgtcctcggaacagtcgttcacacagataatctctgagaattcaaaattttcttcaaagatttcaatgacagtgttcaaaaagtcctcgacgcgattttccgcattatgaacatagatcactgctgatacaaaattcttctctttattctccaccttcaagtacctcgtccaaatcatatactgtatttatttttcccgacaagacccccacgaatgtaggattcctggaataggtccggatcaccgtgggcctggaatcatcgatctcagagctttttaaaatgggcttcatggaaaataaggattttttatattcaaactgatactcatccctcaaatacttctctgccagcttagccatatagggatatgctgtccttggttttgcaggacagtcgttgcagttgcccagatgccggggggaacaatagcctccgctcttctcctggcaggcaaaggtaggaaccccatcatagctggttgtatggggggtaaatgtcacggaggtcagagaatgaaagcctgtttttccaaagggcatgatggaaaagaacgggccatccatcacggtaaacccatattcagccaattgatcattcacatcgcacaggataatctcgcacagctcatattttatgccaaacttttcatagcccgccaagtctaaaatctgattggttgatgcataagctgcatttaacagaaattctgtctccagctcttcttgatccacaagacggattcggtagctgtccgttgttttgtctatggctgtgatattcacgccatatcgaagaatcacattgggcagggcattcagcttgtccagatagtatttttttaatatcatggcatcaaatgtatactcccgagtcaaaaatgccccgtcacacatgcctggtttaaaaaatttgtctgggtgcagttcctgacaggggatattggccgccttacaaaaatccttgaactgctccccgtctgaccaggaatattgtgatgaggtagcatataccttcttaaattcaccattaatacagaagccgaaatctctattaaatcgttcaaaatagcctgcggatttcctcgcagtagagattgatctagggtaatggtacccctggtgcacccttgcctggttaatatacgtagcccgccggaagggctccgggtcgcattctaaaaccaggacactctggcccttctggccgcaggacagggctgcatacagcccgtagatcccggcaccgatgatgattctgtcatatttgtttatcataaaatattcctcctgaaaggattattctctttgcgatgattaaacaatacacttttcttgtaaaattgtccactgctttttactatgatgagggctgactggcgagatggggccaaattttcctccataagaattcttttcatacaagaatctgtgatcaacaatttccctaatttttagaattttttaatgataattgcaaaatagcttatgctaaatatcgacgtacgctttcacgtacagtataatagactaaagaaaggggttgatttcatgactacaatcagtgcaaccaaagcaagggaatctttataccagcttattactgacgtaaataggaacaatactcctgtcaccatcaccaatagccgcggaaaaaatgcagttcttctttctgaggatgattggaatgccatacaagagaccttgtaccttatgtccatccctggcatgacagaatccataattgaagggggaaacacgcccattgaggaatgtgtggctgaagacgaggtggattggtgaagtatcggattgtatatgaaaaacttctgggcaatctggaagggttcttttccaatgataagctcagataacaatgaataagccctccatccgtcagaaactcctgacgaaagagggcttattttacagcatcaaaacacatcacatatgctctgctgacttatgactattccttcccactccaacaatacgtacacagcttacatggttcaatgtcaatggatttctccagatcatccagtctatggtacttcaaagaggtgaaattcagctccttgcggatctcctccagcatttccttataattcgtagaattgggatctgcatagtctgacagcaccttgccgctcacatcctccccttctctctttgcaatgatcctgcgggtgatcagatccatctctgatttcgaccttgagaagttcaaatatttacagccgaacagcagcggcgggcaggcgggacggatatgaacctccttggcgccgttgtggtacagaaattccgtggtctcccgtagctgggttccacgcacaatggagtcatcgatcataagcaggctcttatccttgatcaacttgtgcacaggaatcagcttcattctggcgatcaagtttctctggctctgctgggtaggcatgaaggaacggggccaggtgggtgtatatttaatgaacgggcgggcgaagggtacaccggaacggttggcatagccgatggcatgagcgattccggaatccggcacaccggccacgatatccgggttcacctctcctgcatcccggcgtgccaggatatcgccgcatttatagcgcatgtcctccacgttcacaccttcgtaggtggatgtgggatacccataatacacccacaggaaggaacagatcttcatcttatccccaggcttaacaagagtctccacaccctctgaggtgatgaaggcaatctctcctggtcccagttccttataatcctcatagcccagattaatataggcaaaactttcaaaggaggcgcagaaagccccctccttgtggccaatgatcaaaggggtgcggcccatacggtctctggctgcatacaggccattaggagtgaggatcagcatggtcatggaaccttctattttctcctgggcatagcggatcccctctgccatggtgggcttctggtttatgagagcagccaccatctccgtgggattcacactgcccccgctcatttccaggaagtgggtatgtccgctgcggaaggaatcagcgatcagctcgtccatattgttgatctttccaactgtagtcagcgcaaaatttcccaaatgggaacgtaccagcaatggctggggttcattgtcagaaatacagccaatgcccagattcccctccagctccgccacatcccggtcaaattttgtccggaacggggaattctcaatattgtgaatggcacggtcaaatccctttgcctcatcgtaaactgccattccgcctcttctggttcccagatgggaatgataatcaattccgaaaaacaggtccaaaacacaactggtttttgaagctactccaaatattccacccattacgtcattctccttttttcatatggtgtcacaggatccttcttttctctcacagacagatacaaggacaatttatcagctattggaagtctccgtttttacaaggcttcccaaccccaaagggctaatttttctcaatcataccttgtcattatataaaaacgtctgtgagaagtaaagcatttttaccaaaaatacagccaataaattgttgtttatgcctaaatatttttgttttatctattatttttacaactttgcaaaattgttcagagcctttcctctcaggatatggccataggtttcctgccactccttccaagacagatcatcccttttggaaaggccgtcgcccttgccttaaccagtaaaatcgaataaggaaaactgattggaatcgggaatatccccgaacagattcagctcatccataagatcgatcacagttttactcaccttggtgcggttgcggaaatcgtccttggacaggaagggtccatccttcaccgcatccaccacagcgtccgccgccttatctcccagtccttctatggtatccagggcaggcatgagctttccttccatgatctgaaatctgtgggcttttgcctgatacaggtcaatgggcaggaattcaaagcccctggcatacatctcctgtacaatcttcatatccttgaaggtatcctgctcctttttggaagcggcatctccttttttcttaatttcatccatataaaattccagccgttcctttcccatgcacataagctcataagaaaagctggtggctcggatactgaaataggctgcatagtaggccagcggctgaaacaccttgtaccaggcaatgcggtaggccatcataacataggccgccgcatgggccttggggaacatgtaggaaatctgcttacaggaccagatgtaccagtcgggcacatggtttgccgtcatgatctcctcccactctggacgcaggccttttcccttacggacactttccatgatggtgaaggcctggctgctctccacccccatgttgatcagataccccataatatcatcacgggtacagatagccgtggaaatggtggcctttccttcactgatgagcttttgggcattccccagccacacattggtaccatgagacaagccggaaatacggatcaggtctgaaaagcaggtgggctttgcctcctgtaccataccgatcacgaaatctgtaccgaattccggcacgcccagacagcccaggggacaccccccgatatcctttggttcaatccccaatgcctttgtactggaaaacagggacattacctccgggttgtccaaaggaacatccttggcgtccgtcccggtgaggtcttccagcatacggatgatggtgggatcatcgtgccccagtatatccagcttcaacagattgccgtcaatggaatggtagtcaaaatgtgtggtgatgatgtccgaattcacatcattggcaggatgctgcacaggggtaaatttctcaatctcctccccgtggggaagcaccacgatccctcctggatgctgtcctgttgtacggcggatcccggtgcagccctggacaatgcggttgatctcgcagtaccgcttcctctgcccccgctcctcaaagtaattcttcacatacccaaaagccgtcttctccgccagagtaccgatggtccctgccttgaaggtatgtccctccccgaaaataacttctgtatatttatgggcattggcctggtactctccggaaaagttcaggtcaatatctggctccttgtctcccttaaagccaaggaaggtctcaaagggaatatcgaagccgtcctttcgcattttagctccgcagtggggacagtttttgtccggcatgtcacagcccaccttgccgatgtactttttcacatcctcagagtcaaaatcgctgtattggcagcttgggcatacatagtggggcggcaggggatttacctctgtgatccccgacatggtagccgcaaaggaggagcccacagagcctctggaacccaccagatagccgtctgcatttgacttccacaccagcttctgggcaatgatatacatcactgcatacccattggaaataatggaattcagctccttggccaatcgttcctccacgattttcggaagggggtccccgtagatctcatgggcctttttataacacatttccttcaggtcctggtcggaattttctatgaccggagggtatttatccggatgtatgggggacattttttccaccatatccgcaattttattggggttggttatgaccacctcctctgccttctcactgcccagatactcgaattccttaagcatctcctctgtggtgcgcaggtacaagggtgactgattgtctgcgtcagaaaagccgtttccagccataatgatccttcggtagatctcatcctggggatccataaaatgcacgtcacaggtggcaaccacaggcttttgaaactgttctcccagctccacgatcttcttgttcagccggattaaatcctcgttggaattcaccatatcgttcttttcatctgcgatcataaactgattgttacccaggggctgaatttccaaataatcataaaaattcaccagcctggcgatctcggtctcaggcgcattgcgaagcagggcctggtacagctctcctgcctcgcaggcacttccgatgatcaggccctccctgtatttttcaaacacagacttgggcactctgggtcttcggttataatatttcagatgagactggctcaccagcttgtataaatggatgcggccggtctcattacgcatgaagatcactgcatgataggtgggcagctttttgatggtgtcacaagaaactgcgccttcctcattaagcttatccacatccaggatatctcgttcctccagcattttcacaaatttcacaaaaatctctgcggtgcaggctgcatcgtccactgcccggtgatggttctccagggagacccccaccgccttggcaaccgtgtccagcttaaagcggttcagggcaggcagaaggaagcgggccatgcccacagtatccacgtaagtaaactcctgggaaatcccttgacggctgcagttttccataataaagcccatatcaaaatctgcattgtgggccaccatcacagccccctggcagaattccaggaacttaggcagcacctcttcaatcaccggggcatccatcaccatagcatcattgatgctggtgagctgctcgatccggaagggaatgggcaccctgggattgacaaaggtggaaaaacggtccgtgatggctcccttctccacccgcacagcgccaatctcaataatctggcaggtaaggggagaaaatccggtggtctcaatgtcaaacaccacaaatgcgccgtccagacgctgtcccttgccgtttgtgaccattccctttaaatcgtccaccaagtaggcctccatgccgtacaggaccttaaaatccgaatccttcggcacgcagcctccccaggcgtcaaagcaatggtttgcctccgggaaggcctggaccacgccatggtccgtgatggctatggccttgtgcccccactcataggcccgcttcaccagggccttggcatctgtcactccgtccatatcgctcatcttggtatgacagtgaagctccacccgcttctgggggctggtgtccatgcgggtggtggtgaaatctgcaatcttcttaattcctgccacagagccgatggtgagctccccatcaaaccggtcaatggtggtaaccccccggatcttcagaaatgcaccctttttcacatgggcggtcacctcagggacctgttcattgtgcaggaacatttttaccataatggaatcagtaaaatccgtcactgccaaaatgagaatggtcttctcatttcggatctgacgctcctccgcgctcattacctgacagcggatgaccacctctcccatttctcctgtaatggattccagggtgatgggctcgtcctcaaaatcttttccatagatcacatccggattggggtccttgcggaagggccgccggaaatctccctttttgtcaaagccttttttctcaaagcccttcttctcctgtccggcctcttcttttctctccttggaagccgcctcctggccggctgcgccttcctgggatacctgttctggatcctcttttttcaggtgggccttctggatcacctgctctacctcctgggcaatttgaagggctgcgtttttcctgtatttgctctccggcatttcctcataaaccggctggatcttcaggttcatgccgcaccgctcgcagaataccttctccagatattccaccaggatctcgcccttttccctggcaatgacagaatccggcatggtgagcaccatctgctcctcctggggaaattccatcctggatctggtaaaaaggttgtactccaggcggttataatttttcagctctaaagacatgctggcatggtaggccgacaagaaattttccggtgtatactgccttgacaggttaaagcgctcgatgatgcgcacagtcaccggaagcccctgaaagcactggtcctcaatggcacgctccaggacaaaaatatgctttttgtgtatccaccgggtactctttatgtaaacccaaaggcgggttttgtcaggattgcaggataccttggtcaccaagaccatttccagcagctcttttagcttatcctccaccctcagattgggaaaaacgtcaaaaaattctttttccattccctcactcctatgcctgccagtgaagcagctcctgtcgcaaggtttccagaagctgatcctccggcacctttttcacaatctcgcccctcttaataaggatgccggtgccccgtcctccggcaatgccgatgtccgcctctctggcttctcctgggccgttcaccacacagcccataaccgccaccttaatatccagggggatgtcctgtaccatatcctccacctggttggcaagcccgatcaggtcaatctccgtacggccgcaggtggggcaggagaccacctccacgcctccccttcgaagtcccagggtctttaggattctcttggcagacttaatctcctccagaggcgcacctgttaaagatacccggatggtatctccaatcccctggccaaggatcatgcccagacccactgcggacttaatatttccggaatagagggttccagcctctgtaattcccacatggaggggataggcagtttctttcgcgatcagctcatgggccttggcacacatgagcacatcggaggatttgatgctgatcaccaggttctcatatcccagatcttcaatgatccgcaccttatccaaggcgctctccaccaggccctgggcagtgaccccgtgatatttttccaccagctccttttccagagagccgctgttcacacctactcggatgggaatcccccggtcctttgccacatccacaaccgcctggatccgctctcttcccccaatgttccctggattgatgcggatcttatcagccccgttctccatggaggcaatggccagacggtagtcaaaatggatgtccgccacaagtgggatgtgaatctgcttcttaatctccttaagggccagggctgcttccatcgtgggaaccgcacaccggatgatctcgcacccggctgcctccagctccaggatctgggccactgtggcagacacatcctgagtctttgtatttgtcatggactgaataagaatgggatttcctcctccgatcaccttatctccgattgtaattttcttggtatggtcccggtacataatcttcctcctataagtatgagaaacacgacagatactcctgccgtgtttcatttgtttggtctcttatcgtttgatttccagtaatttgctttttagttctgtttccatatgacgcatttctaattctgcctgctggcgttttgcccgtccctcttcctggatcttcagcacatcgtccagggtcttgatcagttcggagtttgtcatttttaaggtctccagatccacaatgcccctctccgactccttggccgtctccacagatgccaggtgaagagcctgggcgtttttcttcagcagctcgtttgtcacattggtaacctcctgctgggcctttgccgcctgggtggaatgggcgatccccaaggccagcaccatctggctcttccacagaggaatggtatttacaagggtggtctgaatcttctccaccatcatggtgtcattgttctgtacaagacggatctgaggagcggtctgcatggagatggtcctggtcagttccaggtcgtagagctttttctcaaaacgggtgcacttatcgtccagatccttggctgcctgggcatcctcaggaagactgctggtccttgccttctcttccagctgggcaagctgtccgtcccggacctccttcagcttcttcttccctgccagaatgtacatggtcagttccttataatatgccagattctggtcatacattttgtccaaaagggcagaatccttcagcagccgcatctggtgtccctgaagggcttcgcagatcttctccacattggcttctgccttggtatagcggtttttcagtgtgtccagcttgtccgcctgctttttaaaaaagccaaacagtccatgggattcctcagcgtcaaaatctctcagctcgcccacaacgttggtgatcaaatctccaacctcgcccagatcctgggtttttacattttccagggcggcgtctgagaaatcagccattttcttctgggttcctgctccgtactgaagaatctggttggtgttctgcaggtcgatcttctgggcaaactcgtccaccatcctctgttcctccggcgtgagcaccacctccggctctgcctctaccttcttaggctcctgggcaatcacctgcgccacctcatccttgggctcctcaatttccggctccaaggtcagtgtgggcacgcttgtctcaaaatccttgaattcttctcccatgttcttttctccttatgatgatttttgttgaaagtcattttctgtaagaccttcctgtgcaagtatggtatgcagtactgatatatcactggatacatcccaggccgcatcccggaaaatggaatccaggattttttcaaaggccacattgagggtatccagggtatcttcgatctcttttttggaggagcggatgttctctccctgaacaggctggctgtccatatcctcataggcgtccagcagcttcacagtcatgggaagataatagtccatcatcttcttcaggtccgggatcacctccggatgctccttcacccgctggaaaatcctctgtaccagcatctcgatcctggaaattttgttggagatctcttctccggggatggcgtcattgctttttcggatcttcacaagatactcatttcccttgtccagaacctcctggacctctgcggacacctgtccatccacagatacagtgggagcttccctcactttccgctcctccagctgacgctctgcctcctgatactgccgatacatatcattggtagtgatcaggcaggtttcttctttatccacatgaccttccagaaaccatccctttgcgatcatcttcttaatatcccttttcacaaacttaaccggcttgcctaccaatcgggccagtctttcaaactccgaataggacttgtccccaatgccggagacataccgtttgaaacgtcccagggccgtgagcttggtgcagcctcttgccaaaagtgcggcgcctcctgcaatgcccagaagcataatgccgatccccacattccacagagagttcacacccatggcggccttgccgataagggccaccacaaggccaaggctcatggcgctgctgagaataccgccagagatggtcagcatcattcccttcagctgctctcccgtagtccctccatataagctgggctttgtaacctccgccgggcgtacctgagccttctgcttccgaaaggacggctgctggtagctgctggtccgcagattctccccgcttgtatatactcgctgcccctgtgtgcggtaacggctgcctgggtcttcccctgggtatctgcctcctgcccggttcctgtcccggtatactgtgtttctttggctgtccctatcatttcccagaccgccgccctcctgagcttttccgttcagggcatttttcagagcctcgcttccattttccacagccgtgttcatggcctttctgatggtctggtttaattcctggtaatttctggaatcaacggctgattgtataatatcctgaatctggtttcccaattcgtaaaaatcctgattcttcattttcttcttcgtcactccttagtctcttcccttgattataaacaactatgaaggaaattacaagaacaaaccatacattctccaatcccctttcatcattttaagagggatccttgtacaccctggggcacgctgtgccattgtggaaaaaatcgtataaaaaaggaagaaaagaatcccttcctttcctccttcgctttttttaccagataccggctatcttgtcaatgagtttattataccggaacagcttcttgcccagctccatgacaatggacacaagcagacttgaccccaccacagcgcccaggatcacccagcagtttccaagggaatagaattcttccttgaaccagagcataaacaaacagttgtggagaaagtacatgttcatggagtatttccccacaaatgcaaggatatggctcaaaccaggtattctcacaatatacagatagcagaagcagataaagatcagggtggccgagcagttggtaagatctctcatggcccggatcccatagtcatttctgtaatatgctgtaactcccataaggacaaacagaagcagaaacttcagcgcctcacccagaaccggcttttgaaaaggtttccagtccttcagcttttggaacagattcttatccgcaaaccacatgccccatacaaccatgagaaaccacatattcatatccacaagctcaattcccaggacccgtggcactaagatgcacagaccggtcataaaaaagggaccgatcttgtcatacagacgaagcatcaggggtatgaagacgatgatcacaatggccagacttacataccaccaggtaggcagaaatgtgggcgttcccatcatatgggcaagccccagaaaatccaccgctgcatagaaccaggaccgcagtccctggccatagatctccagccgctggggcgcaaggaagctgctgccgatccaggcaatggcataggcaacccagaagctgcccagcagacgggtaattctctgcatgatcgtacggctcactgttttattttcaaactgcccccgggccatcatggctctgtaggagagagtcagtccgtaagcagtgataaaagcaaacattcccacacagacttttccatattttgcaatgaaaaccgtaagatattcggacagagggaaaaactgtaccccatatcctccgtaacgttctttatctaaaaacacatggtggtccagcatgaggatcactgcgatcccctttagcaccagggtatcgttttttgtaaaagcattttgtgatattgttttcatattctcctatctctcattttctgtcaataaaatctatgcaataattaaagatcctccgataagtagccggggaataatgaaggccgtcacgtttgcccatacctctgcggttgctgatccagccattatttttcagccaggtacaggtatcaatataagtaaacagtggatcgctgcctgaacatagggaagtccggatggcccggttaaaattggttacctcctgctctgttctgggcatgcctccgatctttttgatcatcagactgttcaaagggttcactgacatgtaatacagctcacagttccatctcttcagatcacctgccactgtatttttcataaactgaacatactcggcgctgttgcgcatatcgtttacgcctaaattaaagacaaccgctttattcgcagatttaggggagttctgtaccttgtccagaagctcctgataagccgtctccttcagccagctcagcccctggcctccccggcagatgaaattcaccttctcaccggcagcacctgccaatgttatcgtggtatctactgtacgggaatctcccacaatataaacctcatcataattcacaggctgccgcacttctgcatctgtggggaaatagtcctgttcctcaggaaaaatgaccatatagaaggaattggcattcacaggcacagcatccccggcaaaatattccggataactggtctttcctttctgggtggaccagcctaaaaacatatcaaagcttcctgaatccaccccgggaaaggttatcttctgtccgttggtaagggtactggtacggtaaagctttccattctggtcataaagacggaccgtgcgcaccttctggaagacgccataatacttggccgttccgctaaccttcaccttagccccagcctggtacttggctttgctgctgctcttagtggtgctccagccaatccccttgaggctgtcattgctgggaactgtaggcagggtaattgtctgtcccttataaagctgttttttcagataggtgtattcatgattgccatttgccgtatagaacttaatatcgtaaagcttataacgcaccaaagagaaggtgacatttccagtgaccttataggaggcacccactgcatatttctttgtaccggaacttgtcttcacaatccaaaaggaacgatagccgcttttggtagttttaggaagctgtatggtggttcctttaggaaccttcctgccccagctcttaaaaagagcgttggacacaactcccttgctgtttccaaaacgtaccgtgcaggtgctgctggctgcaggctgggcggatacccttctctccccagaaaaggtaactgccaaaagcaatactgtcagacaaatgagccatttccaccactttttacttttcatttaaaaatactcccttattttatcctgttaactttttgttacatttcttttacattctaattatacaaaaaggctcccgctttttcaactgtttccgttaattcttttacttttctctgctcacagcctttttccgcctggtatctcccgccacccagctcacaaatctggtatagccggtgagcttcttcaaaagctctatggccagggagccggccaggctgatcacatacagggaccacatgatcttccaccactgtcccatagaatataagaaatccttcagccaaatagcccggatcagactatggatcaagaatacattcatagaatactttccaaaaaactccagaacatcacgcagaacaggaacccggccaatacactgactgaccaagaatatcaccgctcccgtacaggcgaaaaacacaagatccgtggatttatgaaaaaagctgctgtcataaaaccagtaagtgagcacaacaagatccacggccaggataaatttcagaaattcccactttgcctctccccgcttccagtcccggatcctgcccagatagtttttatctgccagccagattcccagtcccgccaccagaaggtagttgaaatttcctcccgccagcacctccagattgaaaagcctggacaccaccacacacaggatcagcaggcccggtcccttcaccgccttgtagattccaaacatcagcggcagaaccagtatctccgcaagggccagagacatataccaccaggtatacacaagcttgggcgttccaaagaacacggtcacaccaaggaagtccgccaccacatttcctgccacactggtgcccttttcatacatgctcagcctttccggagaccagagcagacagcccaggatacacagcacatagacaaaccagtagcctgcatacagcttccagatacgcctggccagaatagccggcacgccctttaagcgcccttttttctgttcccagagcctcttgtaggctatggtcattccaaaggcagataaaaatacaaataaagccacacaaaccttcccatatccggaaaacttctgcatccccagctccgtgaagggagtaaaatcaatttcataccccttatatcggttcgccccgtaaaaacaatggtgcagcatcatcaataagattgcaattccctttgtcacctcagtatctcttaaggaaaagctgctgccagtgttcttcatgctgtcagtcactcctctctgtcagccaaaatcttatctaatacccgctggcagctgttgctgtcatgataccggaaagtatggttaatcctgtccaggtattttggctttaattcacaattcctttcaatataagatatcaaggcatctatggtatcctccagattatataggacctccccaaatcctgcagtctcataatcaaaatagccctgatcataggaatgaccgccgttaaagaactcatcatgatcaaactgggcatataccaccggttttctcagataggcaaaatcaaaggccaccgatgagtagtctgtaaggatgagactggactgggcaaaaatctctctataggacttgtcctgtccgaagaatatcacctcatcctttttctgaaacagtggaagggactccaccacattgggatggggcataaagcagatggtaaagccattgtcccttgctgccttcaaaagtctttcactgttaatcagctggttatagaattggaaatactcactgtccttaaaatcatcgcctaccttccacacacctttggcgtctgtgccgccggccagtgtctttctccaggtgggcatgatggttacataatttttctcatcatggtacaaatagtcaaatctgggaagtcccgtaagccagatccggtcctctgtgtagtaatagtctccatcaacaacagactgccattccgggttggtactggtgataaatcctgtgagattccggttataccggttgagccatctggacagatcatccttgagaactccatgctgcaaaaatacaagctttctgtcagccatgagattcttataatttttaaaatatcttccaaatggattcaccaccggattgttggcctgggcggagatctcgtattcactcaccagatggtagatcttgtgcttccaggacatggcatcaatgaccttgccgaatttcttcatccgttcataatcatcacagtccttgctgatgacaaaatagggctgcactccttccacaggatgctcctgaagaaaccggaaaaagacttctccgctgtcatctccccgattggtccggtcagagatcagccagattttcttttttaaatgcttttccagcatcctgcagaaccgctgtacaaaaactgccttcttgccggatttgcctccgtctctccatagggaacggtacattctcttcaaaagctgttttctccggctgtccgtatccctttccagatacaggcagcattcttccttatcataataaaacagccacccttccttctcataaagcagaaaccggaatgtatcaaagggtgcaaattttccaaatgtcattttatcatccgaaatcttttccccttccgtctcattccacagatgaaccttggcaggctctgtaaccttgcctgcctccagaggaatggtgcaccggaaaacaactcttttggctgtctgcacatcgaaccagtatttctcatcctccttaggtatacgctgggcgggataatccttcccctgccactggatataggcattccccacatcctccccaaatacactcactctccattccaaggtgagggaatctgccttcagcgtggtgaacaaaagctctgcagcatattcatcctggttcaggaccagatttcttttctcttcaatctccggatctgtacttctctccatccttcctctggtaaggaaatagtttttataagctctgggcatctgggtgttctgtacgatcagtctctcatcccggagcccttccacaaactgctccatccactgccgcagctctgtacagtctgttatctgtgcttccttttgactgctgaaataacctgcataggtcatggcaaaccggagaaggttgtaccttgcataggaaagcttcacctgaggatttccggaggcccacaaaaaaagctcctgaagaaaatcctcacagaaattgcgggtcctgctgtgatccgccaccgtctcctgccaaaattctttcatattgggcattccatttaaggtgcatccctttttgcacagaacccgcaccctctcctgcagggctgtcattttaaataaaagcttccagatttcaagaagctcctgctcttccctggcaatggttcccggcgccatagatcttgggaacagatatgcataatatccatagcagggaagctcataagtatcctccagattctgcctttggggctcctgggcacagtaccggttcatctgctgcacgtactccgccacgtttcttccccccacgggcataacaaacatctcctgtctaaaatctccctccgatgctttcagagtctccatcagtccatcatcatagatcactcctgactgggtgatgcagaccaggctgtcatcccctgcctgatctatggctctgttcagatcagattccttgtgacttctggccccaaagcgtgtgatatacttcttattatgatcaagaaaagcctccagatcacaggtctctttttcttctgaccttggtatatagatgacacggaccttgtcccaggccggctcattgggccggacaatactttccagtgttgccaggcaccggtcattactgtaattgtatacaataaataaaatagaaactggcgcttccttcattgcctctcctccaagttgatttttttcttatactgaaaacccggtaaattgcggattttttcatttttatggccagatggccagtgtgcatagttaacgctattttaatgcatttcccggaatttgaaaaggtcttttaaaaaaagattcatttttctgcaaaattatataatttttatttgcacttgacaatcaaaagttttacaatggtaaagagataaattatccattgatgattggaggaacttattatggagaaaaaaaatattgactgggccaacctgggatttggttatatgaaaaccgattaccgttatgtttctgatttcaaagacggttcctgggaccaaggctctctgatcacagatgagaccatctgcatcaacgaatgtgcaggggttcttcaatatgcccagacaatttttgagggtctgaaagcctataccacacaggacggacacattgtcaccttccgcccggacttaaacgcagagcgtatggaaaattcagccaaaagactggaaatgcctgtttttccaaaggaacgctttttggaggctgttgaaaagacagtgaaagcaaatgccggctatgtacctccctttggcagtggcgccaccttgtacatccgtcccttcatgttcggctccaacgctgtgatcggggtaaagcctgctgacgaatatcagttccgtgtattcaccactcccgtaggcccttactttaaaggcggcgtaaagcctatcaccatccgtgtcagtgatttcgaccgtgccgccccccatggaaccgggaacattaaggctggtctgaactatgccatgagtcttcatgccattgtggatgcccacaaccagggttatgatgaaaatatgtatctggacccgggaacccgcacaaaggtagaggagaccggtggagcaaacttcctgttcgtcaccaaggacggcaaagtggtaactccaaaatctgacagcatccttccctccatcacccgccgttctttgatctatgtggctaaagaatatctgggactggacgcccaggaaagagagatttacctggatgagctcacagacatggctgaatgcggcctgtgcggaacagctgccgtcatctctcctgttggaaagatcgtggaccacggcaaggaaatctgcctgccaagcggtatgaacgaaatgggtcctgtgatccagaagttatacgatacccttacaggaatccagatgggccgcattgaggcaccaaagggctggctccatgtgatcgaataatttcaggacagcctttggacagaacctgcagtattccattaaaatcacacaaaaaataacaacagccggacggcggaaccctctttgggggctcttgccatccggctgtctttcctttgccactgtaaaaccagcttatgagctgaccaagcgtcaaggttttttccagaaagtctatctttcttgatatatatccgcattctctatggttatcttaaaatagggaagataaatatatcgttccttctcaaattcaatctggtccattcccttcccggagataagggccacagccagctctgccatagcctgtgcctgcccctctttgtcattatatacagtcccggccatctctgaatccaaaattgccttcagtcccacatccgtgccgtcaattccgaaaaataccggcagggcagattctgtataattcagcttcttataggcatcaatggccccaagggccatatcatcattgttggccagaacaagctcaattttgttgtgatactggctgatgagcagcagcatccggttctgtgcctgtgcccggttccagtttgcgatcccgtaactgagcttttcaagctcgatcccattacttttcagcgtatccacggcattctctgtgcggatgatggcatcctgatgccccggttctccttcaaggaccacatactgaatctttccatccttgttccggtcaatctggggattggccttaatggcatcagccgccagctctccctgcatcacgccggactgttttgccacagcccccacataatacagcttatcccactgcataagatcctctgcaaccggctccctgttaaaaaatatgatgggcacatcattctcccttgcaagatcaatgatctccgacggatccgcccggtccaccagattcacacagagaatgttacagcctgcgtcaatgagctccttcacctgatcattctgggtgcgctgggagccggccgcatcccggatggtcactgcggtcttgatctcgtcactttccagggcgctcaattgctccttaaaattcaccagcatctcccccagaaaagtatcgctttgattgtagcaggccactcctgcctgcaccttatccggtgtctccggctgctgcattccacaggcacataagcactgcatccccatacataaagccatgccagccgccaagctttttctaaccttcatttgcatacctctgattttctttgtcctgtcaaaacaaatgctactgactcattgtgaaaagaacctcctgattctctttggaaaacagcgtatttctgcggatcaccttataggaaactgttcggttctgcattttatagaaataatgttccagactctcggcaatctctgtcaggctctgataccccacattaaaatcattgggaaccaccagacattctgctatacctgtgtccagataatacgccgcctctgtggaattgccgatgccatacaccaacgcgccatggagattcttggcagcagaatattctccggcggtgatcaggctgtgatcgtcaagagcgatgacaacatccactctgggctgggcatccaaagattttttttctgtgtccttctcaaaatctgacacacaccagaggattctggcccccttgtccttgagcgcatcctcaaaacctttcctccggtttctggaagcttctgcctcctgtgtctccaagagaaggcccagagtctttccctccatatttccgttatagtctttcagcaattcctctgccagagttgagcccatcccataattatccggctgtgtagtgggaagcaccgaatcctctttttccacagatgccgtggattgaacaagcattactggaaccttcttttcaaatttctttagcatctcctgtgccccgtcccccggaaccggctctgcgatgatccccacggctccactgttgagctcccgctggatcaggctcttctgctcctctacagtgagagcgcctccggtactcaccacaaaaatctcgatcttttgatcttctgctgccatttttagtccatatttaaaggcagaccattggttatcatcagagttctgaatgatcacagatactttatcaagattattttcattttttcccagaaacatgacaaaagccagtatgatcaccagcactgcccacactgcttctatcaggataaacaatcgtttgctattcttcatcttttttaccctgtgttttcctgtcaatgatctcttccctgctgaatatatatcctttttccagaatcttactgctctcctgggtataaggaactgctggaatatggatgaaaaccgtggttcccacatccggctcactctccacctttaggccatactctttgccaaagagaatctggatccggttgttcacattcacaagccccactccggacccatgcttatgaatccggttgctgtctgtgagaaccagctccacctcttccttggacatacccattccattatctgccacagaaaaaataatcgtctcattttccttccatccggtgaccttgatctctttgccgtcatccatgccgctgaccccgtaggcaatggcattttcaagtatgggctgtaaaatcagtttgacggtacaataggaatagatggctgggtccacatcaaatacaacggaaaacgcattcttataccggactttctgaatattcatataactctgggcatgctggagttcatcctttacacaaatcaccgtccgtcccttggaaagactgatgcgaaacagcttggccagctgagagatcataaataccgcctcatcgtttcgttccccctcgatcatccaggtgatggattccagagcattgtatagaaaatggggattgatctggctttgcagtgcatccagctcactttttcttctttcattctgctccaaaacaattttcttcataagggtttcgatctgatcataggaccttcgtatggaatatcccagatgccggatctccatggagcccccgatataaatctccggcttttctccggcttcatattgcatcaccgaattattcaatttcaagataggactggagatcctcacggatacaatgcggttaatgagcacaagcatcatggccattagcagcataagcataacaataaaataccggatattgatcattccatgggtaaaggtggaataggggatcacacccaccagcttccacccagtatagctgatcgtcttcacgatcaccttgcgccgttctccctgaaaggtctcatcatagatgccatttttatattctgcagcggccttgctgttttcgctgccaatcccgtcgctgatctgaatctgccgcatgtggtagataatttccccgttgctgtcacagagataataatactggccattatttaaggtattgatctttttcatcatacgggagatattggaatagtccatatccaccagcagaacccccagctgcgtatcgcctctgtctgtgagctcaaccacgcggctcaatgagatcacccaataataacggaaggtgccgtcatcaaacagattttgaatatgaggtgtggaaaaatgcagattctccatctcccccatagcctgttggaaccagtcctgcctggtcacatccggatcctccttctgggatgccaccggctccgccgcaagcagacttccgtagttgttgtagagggcaatgctgcgcagattatcaccgcttgactcatagagaagattcataccccgctggatatccttattctggctggacagatcattttccttgatcacattgtaatacaccgcatccgagatctgccgcatactcaccagataatcttccaggttttccccagcctgttccatgagcttctgggtgctttgtgtgatctcctgccgggacaatacagaaaatctgatgtatagtgcaattcccaggatcagcataatggaaattgatatcacggagatcaccagcataatggtgggctgcatccccctgggttttgcattcttcaaacgtccaaaaaacttatttttcactttctgcatgctccgttctgtatttggaaggtgacacaccgaaccgcctcttaaatacataactaaaatagttaggatccgtgtagcctacattctttgcgatcacatagcttttttcatttgtctcaatgagcaggcgggaggcccagtccatacgataatccgtcaggtagccgataaaagaatccccagtctcctttttgaaaattgtggaaaaataggagttggacacccccagaaccttacagatgctatccagggacagctcctcatccgagtagttattgcgcacatactccatggcctttgataccaaagattttgttgatgtgctccgtgcatggatcaatttatcacggaaggataggctgatatccatcagccattttcccaaggcatccggtcccagatccaggacagcaccgtacagtttcctcatatccccagaaaaatcctgggaggaaatgtcattgttggccgtaaatctatataacgcactgagcagctccatcacatcaatatagtgctgctgcagagattttgccggaacaaagatatgctccagatacttattcactgcttcttcaatctcctccactgactttagacgaatggccttaaacagattggacagctccgcagcactggtaaaatccgcctccagcatctcctggggtgcgatctccttaatgttaatggctcttgaggccccgtaaatcccccggtaagacactgcctcccttgcgctgctgtaagactgggacaactccaggatattggagcagacctgtccaattcccacagtgactaccgctccgatgatccggtggacgtatttgcagaatctgtcacagtcatctgtcagctctgagacttgatcttcatgtgccaactgggcgatcaaaatggtattcccaagataggtaaagcatttggcctgccatttttctcccagacgttccttggcttggttgtgaacagacgtagacaaaagaaagggcttcatatccttgggtatctcacttgacgaggtataaatatccagacagcagaaaaaggggcctgtaaactcaatctgataatccgagagatattttggaatttcgtcctcccgcagcctcccttcaataagcgtggaatagaagttggcccggagaaggggcagggattccatgtagcatttctgcaggatctccacattacgtttttcacttatttcctgatccagctttatcttcacctgggtgaatacattggtcagttctatggaattaaccggtttcaaaatatattcctccacctccagatgaactgcttctttcgcatattcaaattcgtcaaacccagtgaagatcaggatcttagttgcaggaaattctgccttgatgcgcttagacaattccattccgtccatgtagggcattttaatgtctgtcataacaatatccggctgaaattcgctcaccatctcaagtgccttcacaccattgttggcatatccgatcacagaaaagccaagcccctcccaattaattttcttcatgatgacctggatcacttcttcctcatcatcaaccaacagcactgcatatttatccataccttttgtctccatgtccgtatattttcgccctgtatttgtatcagtataacaaatacacaaataaatgtaaacgcagctcaccttcaaaatacatctaagatccacagcctccttaggatccggggtaacgaaaagagccagaacagcgtctgactcttttcgtaattgttcttaattattttttctgaacatacttcagacagtcaagggttactgctgcaaggatgatgataccttcaaatacaaactgaaggttcgtgtcaatacccaggatggtaagagaataggtaagagcggtaaaaatagtcacaccaactacaacacctgagatcttaccaataccgcctgtaaaggatacaccaccaactacacaggctgcaatggcatccatctcccagccctgcccgtaagctgcggagccggaaccaaccattcttgcacattccagccaagagccaaatccgtagaggatacctgccagaataaatgcgccgatggtcacgccgaatacagaaatacctgaaacagccgctgcctctgggttaccgcctactgcgtacagattttttccaaaggttgttttattccaaatgaaccacacgatcacaatcgccgcgaccgcccagagaatgatggttgggaaaccgtttaccttcgggatgatcatattggggatcgtaggttcaatggcaccaaaggacacaccttttgtggcatatgtaacaaggccgaagataaccagcatgttggccattgttgaaataaatggatgcatcttaaatcttgccgtaaagaaaccggcgatcgtggtaaagaacgtacacaaaacaatacatactaccagagccaggatcaccctgacaccaacaggcagatttgtaaaatcaaatacatggccaaaaaccgcacctgtattaatccctctgtgcataatgatcgttgcggttgtcatgcccataccgatcatacgtccaatggaaaggtctgtaccggtaagcaggatcaagcctgcaacaccaagtgccagaaacattcggggagaagcctgctgaagaatattcaaaacattattgtaggtaagcagaggtacatttttcatcaccggcgtgaccacgcacagggcaatgaaaatcaaaatgatagcaatatacaaaccattcttcagaaggaacgcggtccggttaaatgtatacttgtaattctcccacttctgggctcttgactccatgaaagtaaatttcgacatacgaagcatatcaatcagatggtatttgtaattgtatgccatatgttttctgtcttttacctgctgaagatccttttcatactgcattttagcatcaaacaaacggttcttgtaaacatacttctcatcctttatttcctgatgatcagtaagctttgacagaatctcctgatgctctttttccaattgtgcgattcttgtgcggtgcttctcctgtgcggctgctttttcctcctcacagctttctttcaccggctgataataatccttatcaaagtgagcgttaatataagcttccgcatctgctattaattttgagacctcatctttatttttcgcctcaactgcttttgccttttccagttctacccggattttagcaatctcagcatctttttcttcctttgtatagttccggtctctctttacactgtcaattttattttgaagagaaataacccggtctataccatccactctgaggctgtcaattttttcttgaattttaccgacatattcttcggttggctgacgcagctgcatttcctgttcagccgtaagaatcttactgtttcctttcgccatattcaccaatctcccccattataggtattttgcactgagtcttaaaagctcttcctgatccgtctcttttgtattcacaattccggaaaggtgcccattggacataacaccgatacggtttgtaattccaaggatctcaggcatctcagatgaaacaacaatgatcgtctttccctcttttgccattttgataatcagctcatagatttcatattttgcaccaacatcaattcctcttgtgggctcgtccatcataaagatctgaggactgcgctccagccatttgccgaaaatcaccttctgctgatttcctccggaaagacttgatatcatatcctccgggcccatgcatttggtatgcatgatcttgatctcatttgaagttgccttgatcatcttcggttctgaaagggccagaccggacttatactgttccagatttgcaatggtggtattaaatgtaagatctcccttcagaaagagcccgttggcctttcgttcctcggtgatcatagcaaatccatgctccatggcttccttggcactgctgaaattcataaggcggttattaaaataaacccgccccgccgctctggtccttacaccaaagattgtctccagcagctccgtgcgccctgcgcccaccaagccatacaagccgaaaatctccccctcttttacatcaaaggaaatatcctgtaaatgaggttcaaactttgtggacaaatgctgaatggataagatcacatcctttggtttattatcaaccggcgggaaacgattttcaagagaacggcctaccatggccgcgatcaactcgttcatattcgtatcttttgtgggttttgtcataaccaggttgccatctctaagcactgatatttcatcacagatctcaaaaatctcatccattttatgggatatatagatcagggaaatcccctgttcctttagcatattcatcatctggaaaagcttttctacctcctgcactgtcagagaagaggtaggctcatcaagaacgatcaccctggaattgtaggaaattgctttggcaatttcgcacatctgtctctgcgatacagacatatgtctcatagactgggtgagatttacggtcattcccaattttctgaaaagctcagaggcttcctttttcattctgccctcatcgatcacccccatggagttggtgggataacgtccaaggaacagattgtcgatcacatttctttccagacactgattcaactcctgatgcaccattgcaatcccgttctcaagagcatcttttggtccggaaaagctcacttccttgccctcaaggaagatattgccctcatccttctgataggtaccgaaaagacacttcatcattgtagacttaccggctccgttttcacccataagccccataactgttccgcgcttcacatccaggttgatatgatccagaactctgttacggccgaaggacttgctcataccacgtatagataggacgatatcatctttcttatcttccatatgtttttactcctgtatagatctattgatatctataactattcaatacctgccctgccgtcttgcggcgtgcgaaaaatatccggcaaaatactggatactgaatacttacgatacgtttctaaattcaagctgctgtcctgtttcctgcagacggatttatcaaatacacccgcctataaaactattagggagaatttcttctccctaataatctaagttcaatggatattactgattaagcaaagatgtataagaagctgcattatctgtcttaaccatattaatagcaaatgcatcatactggcttgggttaccaagacggtttgtaatgttggactctgtctgtccgtcaccgccgatgtaatctacatccagattaagaaggtcatcatagttctgcagaagcggctgataagttgagcttaagaagttatcagatgcattgtagatatccagccatacggtctttctgggatttgtgccttcatccagctgatttgctacaggctcataaacctttgtagaatctgtgaaatcctgatagttgtcagcagtaactgcaacatttaatgcataataggaacgttcttctgctctatatacatatacgtcatcactgagcacattgcctgcctcatctgctgtaccgataccggtatcaatgtctacaccatcaagggcgttgcggagaacacgaagtgtaaggtatgcctgtacatcagcatgctggctgatggttccgccgtagccttctgcgatagcggccactgcatcactgtttgcatcatagccgaaggtaggaactttgttgtcgcttgaccatgcattaaacatggacatgcccattccatcattattagaaacaacaacatcaatttcatctccgaaggaagaggcccatgtgccaatggcatttcctgctgtagcagcatcccatgtagctcctgcagagttcttcatttcctgagaagcaagctcacggatcacataggtagtgccgtttacttcaatggagccgtcctggactgctgtagcagatccgtctgagtttgtgccaataggctcgctgttgatgtcgccatctttatcaatgcctgtacctaatgcttttcgaacacctcttgtacgtgcgatagaatcattatgtccgatatcaccgatcgccagaacataaccaatcactccgtcaccgttgcggtcaatgctgtcaatgttattctcgatataatctctgaccatctgtccctgaagctcagcaccctgatttgcatcaaatcccacataatatgtattgtcattaaaactcagggcttccatatcaagttctccggtggaactgttggatggctggcggttaaaccatactaaaggtttatctgcatttgctgtgtctgctgctgcaacactaaatgtggtggatgtaagtccaaacagtgccgccattgtaaataatactaatcttttcttcatatacacttttctccctttctttgacacactatctacgtgttctttgttaataatgatagtatagccaaaacagaacgaggaaaacatagaatatttttctgtttccattgaaatttttaagatttcattgttcatattctataatttttatagatagttcttattttttttggccatattccactgaacaaattatccaaaaaaatttcttgtatttgtaaagtattttcttcacagaaagagtattattaatttataagatattcagaagctgtaatgcccctcactccctccaccgcataaaagaaaggagaaagttatgaaaggaacaacaagaaaactgatcttaggtttgtattatcttattttgataccctgtgtctgcttttttcttctgcccgctgtggagatgaaaatccaaaagaatttttcctctacctaccgggcactggatctatatctgggaaatgccctgtgctttcttattttcggtatcctccttggtatctcctgtatgatccgccttcaaaagaatgagctgctgatccttcttattaacatagtgatcttgctgatctggatgtttttcttctacggcaacaactattatgcagccagcatgaagcatactgggaccgccataggctttcatgtgatacttctcataggggccttatttcgggaaaaagcggaaagctgacacaatcaacccatgtatgaagagacctggactatggaatgggcctgatccttcgggaggaaaacagagaatactcctacagccagctggaccggctcttcccccagctgaaagaaaaatatgtccgcacctacggcagccaatacagcgtcagcagccctgacagccggaccttaatggaactcttctataataaatgcagaaaccatgggctggtgtgtgacaatgaacagcttttttagtatttacagacatttgaagaaaaacaggccccacagcagctaagcctgaaagtgaattggacagcaaagtaagagcaactaacgatgctgcttataatattcttgctaaggtaatggccgatccaacaagacctaaattctgaatcccctcgtacattcaactatgccctaggccgccaaacgctgtagtctatcccctgagatttttcagggcggcgggattgtttgaaataatcattccaacagtctgacagttttccagatctgggcaatcaccgcaggtactcacaccttttttcagcgcacactggcgaatggcacagagactgtcacagtataccgttttaaccccgtcaacacgacagccctcacagttgatatgttcaggcagaatgggggcattatttaactctgcccataattttgcagttttttcacgcagtgcttggtcgtcgttgatcgttgcaagatatgcatcacattcttcacaattgagcccgcagtatgcgatcatttttttcatgatcatacctccctaaaattttaaatctccttaacaccatccagcttctttcattcatgaattgtatgtctgtcacttttctttatgtgcagtaataatagtataactatacgcatttattgttaaaatgcaattatccacataaacataccagttctttccttttcttgaaataacagcatttttagaattgattttatccctgcaccattttacaacatcctctgaatccagtgacaaatttctttttatacgcattatccctaattcagtagtatgtattttatccgtgttggacaacaagtcatgattactgttcatagtgcttaacctcatcctatttctattagacatttattatatcatagaataagccttatatcttcataaaacaacattttaactattttttatggcaatatgtttcacctgcctggatttcgcacaccaagaagcacttctaaatagattttttacactcttctacttcatttaataacagcgattggataaatggatggttttgggggcttttcattccctcatttaatttgcttcatctatgactggtatccatatctgactgagataatttttgtcatcagaattaccaacactgtaccattccagttccgggcactttgcatgctggaagggatattttgtcagccattcctcctgcaggtatttccagccatcttggattgcctgaggcactgcccctctgcagtcaaataccgcccataaagcatccggtatctggatttcactgtatccctccggcgcctctttgtctgagattaccatgatggaatattccatctcctttgaatccggtttctcataaccaaacaggccaaacatgcctccgggctttccatcatccatggcagccagcctggcgaatgtgccattcttctgacagtcatcccagaactttggtattttcgcatattgttccccatccccacaccggatgctcttccccatcagccggaaagccggcttttcttccagctgccaacaatattgctgctttgctgaaatgttcattttgggcaccacccgtaacttcgtatccctgctgcgagcctcctttggcgttaaaccatgaaactgctggaacgccttggtaaaggatgtgggtgaatcataaccgtattgatagctgatatcaaccaccttctttttcgtgctttttagatcatagcccgccaaagtgagttttctgaaacggacatattctgaaaaactgatgccgttcatataagagaataccttttggaaaaagccaaaggaacacccggcaatttcggagatttccttaggattgatgggttcctgtttccgctgtaaatggttttctacataatctaaaatcatctgcaatttttcattccactccatctgtctgcccctttctttgtccattataacttatttttgagggtatttcctcttttttaacgtcctctttggataggttccacactctattcttctttgatccattctttcccacagcagaaaagtatgataaaataatccccagataaagtttgtccaaaaaagtcaagaccattaccttataaacaagtatgctgatcatagagaggacaatatggatggattatgttgaagcggtacggagaatgcaggattatatccgcctgcactttatggatgaggatttcagcgtggatgcggtgtgttcccatgtgggatattccaggcggcatggggacaggctgttcaaaaaatatctggggaaaactctgcaggaatatatcaaggcagtctgtctgacccagggagcagatttccttctgcatacaaaaaccccggtacttgaggttgcccttgactgccactttgattcccacgagggttttacgcgttctttttgcagacagttcaatcttaccccatcccaataccgcaataagaaaaccgccataccattatttattcagtatcctgtcaatctctactatgcactgctcaatcataaggaggaaccaattatgaataacggacaaaatctatgtatgatcacaccagtaaaaagaaacaaaagaaaactgatttttctcccctcaaaaaacgcacaggactatttctcatactgccaagaaatggggtgtgattgggaaggactcttgaacagcatcccggaaaagcttgaacctgccgcattaatagaattgccggatttccttgtggaagatggctgttcaaagacggctgctggtatcgaagtgcctctggactatgataaaccactgccagagcaatataacgtggcggaacttgaggaatgcaccatgctgtatttccagagtgaaccctacgaaaatgaagaagatttctgtgcggcaattgaacaggtttatggggctgttgagaaatataatgctgccgcattcggctaccggctggcatatgatgtggcccccagcttcaattttggagctgacacaagtattggtgccaagatagcagttcctgccttgccagtttaagcttccaaatagataagcccgccaaaaggcgggcttatccaaaaaatttgtgtataggtattcgctgaattgtgttttcaagacagctcttttctatctcctaaagaatctcatttgcatttctcttctttattccacatggaactggaagtatgcatagctccaaaccggggagccggcaaaaacttcatccactttgaaataaacatcgtagcttccctgactgccgtcagccggtgttccctgaaccaccgcttcaccttcactgttgatctctacctgaagtccttccggcagagcatcccccaggtcggaaacggagaactctgtgagctggttggaaaaacctcctgagatggcaaacttctgctcaaaggcctctcccaccttcaaatcaaatacagtacctgctgccggatctacggtgagaacaccttccacgtaaagttcaaattcctgttccaaagttttctctcctgaggctgcgcccaccgtaaagctgtagattcctgagctttccgctgaaggctgtccccacagttttccatccttatccaaaaccattccatctggaagtttcccggaggtcacttcgtaggctgcatcttctgcactttcttctatttttaaatagatttctttgtaattgtatgtagctttcccactgggaagcttagaatcggtaacgacttccgcttctgtttcctctttttccttagatggggtgttttcctctgtgggcgcttctgttcccttgggatccacggtcagagttaatgccttcactgcagtattcccctggtcatcggtaacctgaaataccagatcatattctccggcagttccttcttccgggattccgctgagttttccattgggggccagcacaagacctgcgggaagctctgcagaactttcatccaaggcaaatgtatagcttactgttccaaaattgctgttggcccagagcggatttttctttctctggctgtactcttctccctcacaggcatttaccagggtcgtggtcacaatgtcaagttcgcccacttcctgatgctttgaggcatccacagccaaggagctgttcattgcactatacaacacgtgatatgcattgcgcagcatcatatcccggtctacaattccatccttccagcactggaccagctcatcataaatgttgtagcgggtatgggtgccgctcatgatcatatcattgccggctgccatctcatatcctgaaattgcgatatcatcaaaatcgccccaatcagtcaccacaaatccctgatatccccactcaccccggaggatattcgtcagaagttctggactggatgcacatgcctggctgtttacactattaaatgcggacatgagattatgcaccttgccggttttaaccggaatctcaaaagctttcatgtccagctctcttaatacacgctcaggagcgatcacgttcaccgacgccttggaggttccctccgcttcacttgcaggagtatacaagcctcttctgtaccattcctgatcatttgccacaaaatgctttaagcacacggtcacgcctgactctgccacaccgctggccaatgcagcagcgccttttcctgacagcaccggatcctcagaccagtattcctgatttcttcccaccaatgggtttctgtgaaggttgatggcaggcgccagccagttatctacattgttcaagagcatttcctcgccctgacatacacccatctgatacaatccttctgtgttccaggtacaaccctggcctgcaggacggatccatccagtattacactgtacaccatcaattctcaaaccagtaccgcttccgccatctgcatatccctgggagggaatacccagccgtaagaatgcccgggaggttcctgcacctacgttggccttgctggccaccttgcctaatccaatggaaggctcgtctgaagcatacagatcaatggtgtcgtctttatttccctcttcatccaaataaacagcgccagtaccgccgctcaggaaaatcgccagctcctcatctgtcatctgggtcacaaattgttccagcgagatctttccatcgatcactgcctggaaggtatatgtgggtgcatcctggggaagctcctggaaagaataggttggattctctggagcagtcagtttctgatccacgtaggtctcatcaatggtgatcgtctcagcagaagcaatttcttctgcttccccttcataagaaatcggagtagcatccgcatatttcagacggttgttctcatacagctcctcgtttgcctcctgcatttccatctgattggagagctgttccacaatgatctcttcatccacatggatttttcctgccacatgggtatttctggaggaattccccacacggataatataatcccctggttccagaatgtaagcagcctgctcctcatcgtaggatgcaatgtcatagaaagaaacatctacgctcaaatcctgctgtgctccactttccagctcctctgacttggtataggccaccagattctgataagcctgctccagttttccctggggtttggaaacgtatacttccattacctctttccctggaaccacgccttcctcagattcgttcttcaaggcagcgcttactgtaaaattcttttcttcctgatttaccgttacctgcagattgtcaaaggtaaaatccgaataggataatccaaaaccgaatggataggcaatatccccattaaaggtgtcaaaatagcgatatcccatatagatgtactcttcgtatgcacttatgggatccttctccgagaactttctggaaccatattttgattcatttgcctcccagtcatagcctttgtcctcataagaggtgtagccaaagttttctgatgtgggatgatcctcatagtgccaggtgagcgtatcgttcagcttggcagagggatttaccttcccgtaaaggatgtctgccatggccaggccatgaaactgtcctgcaccatattccaccaggaatgcatcaatatcgtatttttcaaactgctccatatcaataggtgcagttccagtatatacgaggatcacatcgtcaaatttatctgtcacctgctctaaaagcacccgctcagaggcatttagataccagtcacctggctgaggaacgggattgcggtccatctcctccacaccagtggaccgggagagatatacaatggcagtatctgcatattctctggctgctgcgaccataccatcctctgtgatctggccgttatccagttttatctccggtgtctgtactgctgaggtccggttccatccagatccggactcggcattttctccccactcttccgggtactctttttcttggtcccatccatggtcaatggtggtctgcatcattttcccccaaggggattctacttcctcctggccgatcttactttccacatacttggtcaaatcctggtaatagtctgcaccgatctcctccaagccgtccttcaaagtggcggtaaatgcgcctgacgccccgcctgagcctccgcctgtaggcggcatgatctgcccggttccaaacacagccaccttatcctcctgggtatttaacgggagaatattatcctcatttttcaacagcagaatagcctcattctccagttgtctggctacttcctgatgctccacctcccaatcataggttggctgcggctctaccgctgcaaatacattgccaggcagaagcatggaaacagacagcgccgtacatactaatttttttccgtttttcatccttttttcgtaactgccagatttttggcagctaccttcctccttccattgttcattctttatcatagatacgctgtatctttatactacccgaatgcacaaggaattttaagcaataaaacggacttagggatgttacaaaatggacttctatgtacaaaccgctgttattttttactgtccattccatattttcgtcgatattccacaggactcatgcctgccacagatcgaaacatattgcaaaagtatgaattgtaggagtaacccaccaactcacaaatttcatctatagtctttgatgtgcccaccagaagctgctttacccggttcattctctggattttaatgtaatccgaaagggaaaccccttcctcctgcttgaataaccgggcagcatagtcaggattgagataaacactgcttccaatctcttttctggtcaattccctgtccaggtgctcatcaatatatgactttattctgtccacaacctgactctcttccccctcctcattctccttcctgcaaatactcagttccagtctgtttaatttcctgcgctgaacaatggccccatggagtttttccatcatctcctgatagcggaccggctttagcacataatcaaacacatgatagcggatggcctcttgggcatagtcaaagttagcaaaacaggtgagaaaaatagtcaccagcggcagttcttttttctggacccatttttgaagccaaattccatttttccctggcatctcaatatcactgaccaaaatatcaatgggatgactttccaaaatctcgcaggcattatccacactggtctcccaaaatacctctccagcctccagcttctttagatccagccctttttttaatccctgcagacaataaatgtcgtcatccacaaaaagaaaattaaacaagcacctctcctcccttctctggaatcagaagtatgatctccgctcccgagccctcggctctgttttgaatctgcagttttaccttttgtccatactgcatataaagccggttaattgtattgatcataccggagtttcttccagagaaattatccacttctggataattccggataaaccactgaagtttctccagttcctccttaggaaagcccgggccgttatctcttatgatgatccttgtcaattgggtcccctcatcccggacagcctctgccagaagctcaatttccatcctctgcttcatattaaacgcatgtttaaaaatattttccacaaaggtgagcaataccagtggtaaaaactgcgtaccctgtgcctccggatccaccgtatccttgtaagtgatccggtcaggatagcgcatctgctgaatctgtatgtaatttcgaatatgacccaattcatcctttaaaacagccatctgtccaaaggcatttcccatatacctgtaataatccaccagatttaatgcaaattgctggatcagctcataattttcaagttctgccaaagaatagatgatattcagacaattaatataataatgggatttgatctgggtctgtagaaaccggatatggcttttctgttcctcaatcctggactggtaaaccctgagctgaagtgtctccacctgatccgccatctgattcaaagaagaaaaaacgctggcaacctcctgaatatccgtctccacgcaaattcttgaagtcacgtctcttccgatcatctgaagtcccttatttaattccttcaccataccattaatcgtacctgacagccttcggaaaaagagaatcaggaagaagatcagcaaaatacaggctgtcaggatcactgcaatggtccgccaaatgtttctgtcatagcgttccagttccagacaaatatcaaaatctccaatctgggaggtgcgggataacattaagacattgtttttgtcccactccttatccaacggaaaatcacggccgttttggcggaaaaaaatatggaagccctgtccattcatattttctgcagcccctatcatcgtatccagagccttttcatttatccaggccgcacaataaaaatcctgatagcggaccacacagagaaggcagaatctgccgctttcatactcagcccagctccatcccgtgttgaacacccccctattttcctggctgttcacaatatccaacagatactctctgatctggttggattcatcaaaggaggtttcattggttcggacaatgctgtctcccttgtagcagaagaatcctccgcccactgatggatacagggaaataaactcctccagctgctgggacagggctttttttgcctgaaatttttctgccgtctctgtggatgtggcaaaaaacgccgcattgctattatcttgtaataaattgtagctgtagtcataaatatttgccagttgggaatccagcaggctgccatacagctccagcgtatactcgcccgtgttgctggcataacgatccgctgttttcttagactcaaagaaaatcaacagcacaaagacaatagctacaattgaaattgttataaaggtatttctgcagattttcacaagggatgttaccttaccggcggttgtgtttttcattgtccttccccttctatataagcattcagctgtttctgcttctcaaggatcacctcatcgatcccagcctgcttcagctccttgcagaattcctcccgaacctgcctggggtccacctttccagaaataagaaggtccagatagctttcacagatatcattgcatctcactgcctgtttatacaccttgcggttatcaaaactgaaaccataggccactgaccgctctgccgtctgattggcctcctcggtcttttcccagagatttacatcttctccctcaatcacataagagagatactgattacaatattcatatccctttactcccgaatagctccctttccctgtgagacggatcacatccttcccgtttttttcgtaatgaattccctcaattccatacatgagcagatttgcaatatatggatctgagtacatcaaattcagcaattccattgccttctcagggtttaccgatattttagggattacataaaccatattccggctgctactgtaaaccgtataaggatgaagttccagactcttgatcttgtgtccggtgagcttttcctcctgcatttcaaaccctggttttcccgctccaagcacactgaagatggtatccgaggaaatatacttcaggaggaaattgaaattatcgtataaatcgtacagatatcccttctgcccccattcataaaccaaatccatgaattcccagaattcctctgtttcatataaattcaccaattctggcttcgtcacgtccatcagcacacccagattgtcctccatacggtcaaaaaaattgaggtagcgccagtccagggccagaggcgttacccctgggcatttctgctttacctgttcaaatattgttcccagcgtatcaagagtggcagaatctggaatctcaatgccatactgttcagccaagtctgcattgtactccagcaccacagaggctccccggtcccggttggtggcaatggccatcaaggagtcttcatcataataacaatattccttggaaagattgtcaaaaatatccctgccggatcgtccgatcagctcatccagttcacagacccatccattggagatccactcctttaaggttgtcatagaagagcaataggcaatatcaatttgtttctttttcaccaaagccgaggtcaccgatgtctcataatttgtaggcatctccaactctaccgtccacgctcccaattctttcaaatgctcattcagtgcctgattaatctgccccagatcatccacattgccgtctgtaggcggcagatatagtaccagtttctgttcttccattctcttttccttggaccctatcttccagattccaagcgccaaacacacagctgcgcataaaatccccccataagccactacttttttcatatgtatatccttcccagccatttgtttctgcacacccttttcttatgcgccctcacccaaacgttgccttagggtatggattattctcatattaccataatctcccaccaaaaacaaacctgcagtcttaggaattcttttctaattctctcataaaaacctccatattacattaatgctcattctcaacactttattgccccaaagaaaaattttcatgctgtcaaaaaagttgacaaatgagagcacaaaaagaaaagaaatatattctttcagcaggtatgctactataagtaacatcaaaacagcgagtgaggagatgattcaatggaatggctgcaaaatctcagtaaagccattgactacatagaaaaaaatctcgatcaggagatttcactggacgaggcggcccgcattgcctgttattccccattttattttaagcggatgtttgcctgtatcaccgggataactttgtcggaatatatccggcgccgcaggatgacacaggctgggtttgagctgcaaagaacagaccagaaggtgatcgacattgctctcaaatacggttatgcgtccccgtcgtccttccaccgggcttttcaggccgtacatggcatttgtcctgcagccgcaaggaatgcaggcagcacattgaacgcctacccgcctgttaaatttaccgttacagttacaggaggaactgctatgtcatttcatgtagaaccaaaaaaagaaatgcgaattgtagggatacggatgcctttaagtgaggacatggaagaaaaccataggaacgtcccggttttctggcaaaaagcatttgctaaaggaaaggtcagggaaatctgttctttatctgaccaagccccggaggggatattaggggtgagtgtatatcatggccccgatgatttttattactacattgcagccccatcaaaaggccctgtgccggagggaatgtatgcgtatgtcattccggcggcagactgggcaatttttgaaaatgagggctcctttcaagaaagtgtgcaggggattttccgccgtttttacacagagtggctcccactctccggctatacctatgcagaactgccagatattgaggtctatccggcccataccgggaaaccgtcgtccgggcattctgaggtatggatcgcggtaaagaaagaaaaggaggactagggctatgacataccgagcaaagatcagaaatgtggagcctgtccgtgttgccatacaggcacaggcagtctcaaaaacatataaaaacggtgtgcgggcactggatggtttcagcctgaatgtccgggaaggggagatcttttctctactgggacaaaacggtgcgggaaaatccacgctgatccgcatacttaccacttatctaaaaccggattccggccaggtacagatgcttggaaaagacctctcaaaggagccaacggccatccgtccgagaatcgcctgcgtttcccagcagacgtccattgatacctatctgtccctggaggaaaatatgatgttccagagccgcctgtaccggattccaaaagcccaggcaaagcagcggatggaaaagctgatccatgattttggcctggaaggttacagaaagtatccggtggcctcctattccggcggcatcaaaagacgtttggacataatgttgaatctgatgtcagcccctaagattctgtttcttgacgagccaacggtggggatggacatccagtcacgcatggccatgtgggacatgatgaagaaaatacgggatgcgtttggaaccaccatatttctcaccacacattacctggaggaagcagacagcctgagcaacagggtctgtattatgaaggatggaaaggacgtggcccagggaacaccggaagaactgcgcactttcatccggcaggataccctcctgatccatttttatatggaagcggaggcaaaaaaacagatgatgtctcttgcctctgtctttccagcatcctggatggaggtgcgaaatacggatatcgtggtgaatacccaggatagtcgctgggatatggagcgggcagcggagtatttacgaaaggaacacatcccgtgccgcggcatggaaatctcacagccaactttggaggatgtgtttttacgcctgacaaagaagagggaaacggagggagacaagtgagtgcagttactattttttaccggaatgtgaaatggcgtttccacaatgcatttaccatcgtgatcacaatcctgcagcctcttttgtggctggtcctatacagcacggttgcaaaagagacgatgcaggggacggggattgataattacacagcttttattttccctggtctgattgtgctggtcagcttttctgcctgcggcagcagcgggatcatgaattatctgatgaagacggatggtagtttttaccgggtactgatcgcccccgttaagagaagttctattgtattggggcagcttctggaggcggtatgctgtacctttctggaggtggggatcatgacagtgatcagtctggcgttttctgtgaatattcttccgaatctcacaggcattctccttatggtccttttggttgcattgaccgcttttttcatggctgggatttcctacagcgtcagcctgatcctgcccaatgaaatgatctatgaaacagtgatgaatgccatcgtactcccggttttcttcctgagtacagcgctgtttcccgcagaggggctccatggagtcttggggacggtcatccgcctgaatccgtttacccatgtgatcaatgccctgcgttccattatgctatatgggactgtagattttggggcaataatgtccgtgataggtctgttcctcctgctgggagccggcagttttggcttggcgctctggcgcctgaagagggagacctgcttgtaaaatggctggccgtctcatgcaggtaagaagacgtgcaagtaaaaaaggtgtgatccgccttcagtctcttgacttttgccatatgcgtagtataatataaaacatatgttgtaaaacgcatgttttaaaactgcaaagggagtgtaatatgccgcaaaaagcaaagttttcaaaggatgaaattgtggaagccgcactgaagcttgtaagaacagacggagccggggccttaacggccagggcactgggcgatgcacttggaagttcggccaggccgatctttactgtatttcaaaatatggaggaagtgcgccaggaagtgggcgcagctgcgaaaaaagtttataccggatatataaaacgagggctggaacagaaggaatccatgtttaaaggggtggggactgagtacatactttttgccatagaagaaccgaaactgttccagcttctttttatgacagaacagaaacacaagccgacccttaaaggggtattgccgttaattgatgagaactatgaggcgatcgctgcctgtattcagaaagaatatggattaaaaggggcgtatgtgcaaagattatatcatcacctgtggatctatacacatggtattgcatccttatgtgccaccaaagtgtgcagctttgcaagggaagagattgatgatctgctgacagaagtatgcttaagtctcataaaaaaatggaagacagaagggaccaagtgatcacaggaggaaataccatgaaacagattgcaatatttaccatgggaaccagaggcgatgtgcagccctatatttaccttgcccaggagctgatgaaaaggaactgcagggtaaccataggaacacatccctgctggagaaacctcatagagtcagcaggtgttttattcttgccgatcgggccggatgtggatatggaaaaggaagccgcgatcatccggggaaagactaagaatcctgtatggagtatgctgaaaaccatgaatttcgtgttcaaaatcatacaaaattcctcagaggacatttatagggcatgtatcggaaaggatttcattattgtttcccattcacagatgggtgcaacggaggcagaggttcttggtatccatactgtaaatgtaactttacagacagaaatgatcccacaggaattgaaaaaaaagacactctctgaccgggtattcggtcctatgatcgcaagacagatggctagaccgtacaatagaatcagaaaaaagtatcagcttccgccagtaaaggatataggaaagatcatgtcagaaaaactggatctgattccaatgagcagctttgtaaaggaaagaaatccctattggggaccacagcacgtccttacaggtttttggtatcaagaagccacaggctatcagccagatgagcggctgcaggcatttctccatgccggagaaaagccagtcctgctggcacttggcgccatgtcatttgaagaaaaagcagaggttgaaaaactggatatgtttgtaaaagcattccaaaaaaccggccatcgtgcagtcatacagggatttcaaaagacattggaagagtatcaactgccagatacaatggtggccgtcggctctgttccacacagttatctgtttgaaaaatgcaaaatggtttttcatcactgcggatttgggacagctgcggcctctctgatctatgggctgccttccattccggttccccatgtgcttgaccagaagggattcgcccagctgctttttaatctcggagtggcaggcaggcctttagatggaaacaaacttaaagaaaaggatatcatccagcgcattactgatatggaattacattatgaggagcgtacaaaaaaagcacagatattatcttcaaaaataaaacaggaaaaaggcctcaccaatgctgtgaatcttatcctggatgcaatgaattaaggtaatattggggtatcttcaaatgttctctggcttgcggattcaccggttatggtaaatccgaagcctgtgaatgagaaaacaactgcttattaggcgtgggtatcaagagattggattttatattgcaataagtattttctatatttttttaatctttccccacctccctaagcaaaaatctttaaccactcctccaattcctgttctccaactccaaggctattcttcaaatacaggtacaaatgttcccttcgcttcattccctcccagcgtttctttccttttaccacactgatctcccacttcagccttttcatcttcttcccgtctattgtatagatctcacaaaccgcaaaacagtctgccattactgccgctcccggccgtccctccaaccagctcctttcacctgggattctccagtattgtttcagaaccagctgcatccctatattctggaacttcttttcatattcccggcaaagctttccgaacatctgcatcattctgttttcatgatagatccgctttcttatttccgcctcttccaaatctaccactatttcttcaggataatattcgtacttaattctttttatgtattcccagtaggaatatgtgaaatttcctacaatatgaactttttccttatcataggctgtttccttgaataccttctccagctcctcccggaatctccagtatacctcctcacggatatatattagactctccacatgagtgagcagttcggaaagagattcaaatatacattcaaaattaagcagactgcttccctttgatttgtaaatcacataaacattatttatagaaatgcctcttctttctaataacttcacacaatctgtatttctgtgaatcgtcacataggcctgctgcttttctcttatgctgccatccgctcttttttcttttaacacgatgggtggaaagaatccgcctggccctgacatactagtcacactatttccatttacaaggcaaatagctttcattgcattatatggtatctctttcttttttctaaaagaaatacacttttctctataaatataatatggtcttaaatatatggtctgatacatgagccatgcgaaaggaaccataagaaaaaatactaccggtataaaaatataacaatctctattcccgcttaataacaataacacaataattccaaagagcacgccaaaaactatataatattgtttaacagttcctatagatactgaaggttcctgccaatactttttcatatgatcttcccatcctcatatttttccaaagaaataatatgtaagtttttctgagaatcctaaccactgccatattttcttcttactcctttttatactccgtaaaatccacaaatcggatattcaggggtgaatcataaacatacatttgcaggtactcttctccatacacgtcccggtacatttctggctctacatttttcttatagatcgttccatcctgaaattcaaaagttatgtaataacgcttattcccactctctttgtaatatttcagcttctgacccaaatttcgtacctgctgcagttttggctggccacacagggaataggctgtggtatatgtgaagaaataactcattaaaactgacactataaataatagaaaaatagaatccaccatcctcatgtgctttggcattcgaaagattcctatccctgtcaacaacagtgtgaaaattatgcaaagtccggcaaacttccatacatcaatcactcttgctgctaaccatgttttgaagaagaccataccgaccagcagccccattataaaaagaagccatactcccgtggacctatgactttcctcccagcttttatgcgtaaaagacttagaatctccccagtacaaaccctgattaaaaaccaaacaataaccatagatgcataaggcagctcctgaccaaatcaatagccgggattttaaacttagaacagaaggtcctgccaaataaacgcacccacaggcagccagcaaaactattgacatgactttaaatcccctatatattcccagtacgtttttattttgccaggtattcttccgggcatcccatgttacttttccctccttggtctccacatatttgtttcgcatgaaaatcggctgatcatattccagttctaatccatactcatccattaaaatagaaattaagcgctgactgttttccaaaaaattatggacttctgttattttctttccgttacgatccaatagaactatacgctcttctactttggattgtttataccgtattgattttatatctcttagataaaaaaacttttttcgtccggtaagtcctatggccaaacactgtccgtctcttttgatgatcatttttatgttataagaaaacaagatcagataagagcaagccgctacagaaaacacggccatcacaccagaaagtatgtatccttgaaaatcatcccgcacagaacctgcagcgaacataaaacctgctaacagcatgcacagcaaagaaaaggctcccataaacatctgaaacccttttgcagtttccactataaatgtatcttttgatactacagcaggcatctgaactctggaggcaaatattgtaaacattccaacaccacaggcgaatcctcctaatagaatattccagccaaaatgcaaggaatcccctgatatcaaaaaaatgcaagtacaaactataccaatgcatccctctaaaaataaacacacaccaacagccatgggaatacgtatctgtcttctgtcatatccactatttctatccatacgcttctgctcctcccttaaattacaccaatgccatattgtatcacaagctctcccagaaagatctgtatattacattaatgcggatcattgatactttattgcatcaaacaaagtattttaatccatcttttctaactcttccaacgattgaatgataaggagccacttcatatttcgaaatagttcttcattttccatctcctgttttcctttccagtatccatatactccttcttactcagtttagcaattttttctcctgaaataggtttcctctcccagtctccccaccatactttcacagtaaatcctgttagtttgtgttcctcatcatatatgaaaaaatattcctctctgtccaactgccattctggtaatttttataatgggtattcttatccgcctccagactcaagtgatcatactcatctttatacatctctttaaacaacacatacatttttgcacactggtaataaggtctaatatacttgtcttcgtttatggcatactgtttcctaaggtttcttactttcacagtaattgattccgtatattcagtaatttctttttcataataaagcacctccagatcctgcagctgttttattattcgttccaccagttctactctgctctgtacctcctcctacaattgaaatggatttctagaaatctgcgtctgctcacatgttgctgtcttactgtttttcatgctataccagcaagcaacgctgctccaatattataaagatacggaaagtttaagaaaagtaatttggccgtttccatctgaccgcatctttccctgtatccctgcgttttttatccgggagcaattcaatagaatctttcattgcctcatattcttcttgatttacttccattccactggcctcgtaataattcagcattctatctatttctccgtctccgcagaatgatttatccctataccccttcaaataattttcctcatctcgttcaaatttgtataatctccatagctcagctccctgaaactttggcatattcaccccttccctccgggcactacacaaaatgccgtctgcatattcataggtttctttttctatctcaactctttctatgcctaaataatacgttttttcataggatacaatgtgatcttcttcataattctgaatgctgatcatctcaatgcttcttccgttttcagtgttcacgtatcgaatatgcaggatctgtgtctctgtatacagcagtatttctgtaaaatacaagcggttctcctggacatgccatttataaagaatcattcttccatttttgtcataatcatattccgccttattatacatatcttttggtacccttttatacagagttcctctgctcacatttgatatgacaagatccttgatcgggctttggcaatagtatcccccgtccagcgtcatatatttcccatattttctataacaaacctgttcttccagcaaatcggtcagcgctttccccgcctcaccaaatactgtgtacaggatcacatggggttttattatttcatagatcttctctatatatttttcgacattcttcccccatcttttccgaatccttccatgcacttccatcatctcttcgtgatccttattatcaggtatatttcttgtttcatacatttcccgaagaattgacagatttttctgcacctcttctttcatatgttcttctgaaatggatggcatggtttcatgatttaaacagtcgacaatctctggtgctgataataaggaaagcagtaaatccgtactctcttttgcaatatcacctttttcaaaataaaataaaatcactctcttccatttatcagcaacgttttcacaattttcttttttctgttctatattttccatcctgctatcggacctcctccatgtttacgaaaaatacacccttcccatttagattacctgctcatgaatcaatagaaattccaaattcacttaactcagaaacacaaattaattctgctataaatactataattagtattttgtatattttctttattctttctcacctttcgaaacagaatttaatcgtgatctacctttcctgccttcatttcccttggtaattgactaatcaaattctattccttactcatctatgaaaagatcaagtaattcatcacgatttttctggggactgtcaactactgcaatcttctctccgttactattcaacaaatttacctttttcttggatcaccgcattctttttacatctcttaaatttcaaaccttgtatatgctacctgatgcagctctggctggccacatagggaataggccgtgttgggattcttctaaaaataatgcttgctcttatagcttaaaaacatcaaatttgtctttgcagcattctcaaattgttctcccaagcatcatcttccactgcttttgcatatttgagacaagtattaagtgccaaacgaaaataatcatcatctgcatatttttgcaatctatccagtatacaaaaagctccaggccaatttaaatcttgcagccatgttaataattcaactaaatatggagttaattcttcatccgttctctcagataatattttcgcacaattatcccaaacatttttgtcatattttttattacaaggttgcagaaacacatttatgtttacaacatctttcgccatttggattccctttacttgatcatctatatttttattccaatcaatcaagctcataatataatcaatattaatcattttaatttactccatcccatttaattgcaaccgattttacagcttgtgtccaaacagaacttgaaccagcttttatccaatcatccatggttccgccaataggtcttacactaatatgaattgctccatcttgaactgcatatacaagcccagtcgcatttaaagcttctatcgtagttatatctgagcctggctttggtaccgtactgaatgatagacctttttctctatctttttactttggtgttagattccccgggttagtaccgttatgcctgtagatgatcacatcctttttatttttttctataacatttgccttaattttaactttttctctttgtttctcttgagtaactgtttggtatattccataaatgattacccccgcaccaactactatatctgcaaacggagctggaccgttcacccaagttaatgcaccacctccagtaaccaatcctgaatttcccgtcacagcttgcacaatagcattcccaaatcccttaaaaatgatatagcactttcaaaaaaatggcctgaagaatccagacaagtaatgggattattcgaacagtattcaaatatattgcaactgttaatcccctggcccgttgacatatagctatccgcacaaataaatcgtctaatctctgtattataatatctactttgcagataatacatccccgtctccccatcatagtaataccctctgtatctgaacgggttcctctttcctatggtggaggctacctttctaattcttcatccgatttttcgcaaatgaccttggcacagttttgccaaacatccttattaccgatcggctgaaacagcacagaaaggtattttatttttcttgcttcttctattcccttcttctgtatatcttctggattaacatcatgtaacatttcgaatatttcatcaattggcattttagttcctccattctattttacaacaacactctttattttttcctataacatctgccttaactatcactttttttctttgtttctcctgagcagctgtttcgtatattcccaatccaatatagatgttattttactgctaccaaaattttatgtaatgctccttcattaccctttggcattcctccgatagagaactatataattgtggattttctatgaaaccggaaagataatccaaccaattttatcttctagctttatagcctcttctatactataactatacatcgcctcaattacactgggattcatatttttaagtctttcaaagataacaaaaaaaatcggccaattcatgtcctgcatccattctaacatttcacacgtatacatttgtaattcttcatccggtttttcgcaaatgatcttagcgcagttttcccaaatagacatattctcaatcggatgaaaaaacacagaaatgcattttatttttcttgcttcttccatcccttttttctgtatatcttctggattgttacaatctaacatctcaaagatctcatcaattgacattttaatttcctccatcctattttataacaacgctctttactgctttagtcgggatagaatccggccctgtattaagctaaatcctgactggcacaccaacaggtaaatcactctcaagtgactatgtggggtatagacaagattcccatctgccttccctacatgcatttcccatggtaatgaaactgatttattaaattctatatttggtatcatactttttgtcaatttgaaacatattcaaaatctctcttcgcatctgccgatattttctccacccaagataggttttctgtcggcaatagtaaagctcctcctgctcaaaacaaatcccggctggcagataataacgcttgaagccctggtgtacgtctgtaaaaaatattttccgaaaagtataattttgtctgtcaacacaaatcaagtaccaaaaacaaacggcttttcctgataatttatcctccacctgttctttcaagaaatcatcaaacattttgtccagccatgtacagtgttcttctgtaagttcctctgtccttaccaacgcaaagatatccagttcttttttattttgtctggaatatatggatccacatattggggcttctcccatccattggaactttttttgaaatttatatccgcttctgagcgtactttcatgaacactcatagccaactcattataatttttatacctacaagggaactccattgccttaagcttgtgcagggaaaccttttcaaacagcttccacatagcatggtcccctgctgttttagtaatgcttttccttattattctgttgtaataagcaacaaccactatataatacaataaagtgctcaccaagattgtaattaagaaagcaaattcaatatagatgtttcgcccctttatcatgctgtatatgccatacaataaaaaaacaatcatttgtattatggcaaatatctgaaaccaataaataccttttagattcgaaaaaattgaatctctgactatattggagtctgcttttctgaaatgctttttataaataggatttttctcacctcttattcgctcataagcatcatatccatcatacagactgctccttttcggcagccagtatattactacatttagaaaaatcataaaaatagaagtccatatgcctccataccattctaccaactcaaaaaagaaatgcatccccagaatgtaagcaatcacgccgataatcaccttgaaaatcgtcttcaaaataaacctcccccccctcgtattccacctcaaatatagttttttattaattttgattttacaattacaaacttcgccaataaataggtacctattttccatcttttaggagaattaagggattctatctgcctttttctctcatatgaaacacatgaacggatagattttagaaaacaggtacagaccctagaaactccaccataggaaaaacagatgaagaaaatatatccttcatctgtctctccaatcaaatatcttttccatacaacacaggtatcttactattttctggacaaaactcttccagtgtttccaaatattcaattaatgattcttcaagataaacttctgtatcagtgagcagcctgattcgattaaattcaaccattgtaatatgaatttcatcacaaagtacataataatcaacctcaccatcatcacttttgagctttatgtcctcgccatctttttgtatactgtatgaaatatcgcaataataaccgttttttaacggaattctatggttcaacatttcatgtttggttttccaccatttcaaataaaaccatatcatttcaatatttactgtacacccatattcagcaaatgcctctttatacttttcagccacacggttatatttcaacaacattttctcttcgtgttcacgaacatcgcacagcatttcttccgtacaattaaatctcatctcaacctccttccccatatatcccaacgtcttgacttggaagataccaacaatgaattaatagaaacaccaaattgttttaactcagaaacacaaagttattccacaataaatattacaataagtattttgtatattttctttattctttctcacctcccgaaacagaatttaatcgtgatctatctttcctgccttcattttccttggtaattgactaatcaaattctattccatactcatctatgaaaaaatcaagtaattcatcacgatttttctggggactgtcaactactgcaatcttctctccgttactattcaacaaatttacctttgtcttggattgctgcattctttttacatctcttaaataaaaatattttttccgcccccaaaatcccgttgtccaacactgcccttcttctctatttacatagattttttcattatgagtagatatcactaggtaaaagcagtaaaacattatcgataaagctataattccaaacacaatatatttatgaaaaacttcttctaatagtccggctacaaataaaaagcctgcgaatgccataaaaaataaacagatagcccccataatcaaccgaaacccttctccgtactctactataattatattttttgattttacggctggcactcgaactctggctgcaaaaatagtaagtattcctataatacaggttattcctcctactccaatactccagccaatatgtaaagagctttctggctccaaataaatataagaagaaattactcctatgcacccttcgataaacatacacatcccaatgattgtggaaactgccactcttctttcatattctctattgctatccatactgttccgttcctccctttccatctttatgaatataaacccgtgcctctttagagtttcgaattctcttctcaatttctccataaaaatgtttatattatattaatgctgattgacaggtctttattgcatgaagcaaaaacttttcattgttcctcatttccataaaaaaacagatgaaagaaaacatacccttcatctgtttctgtctatctgccttaatttaatccccgtatatcattggctgttatatggagtatttgaaaaagctcctcaaccatacgatcatactgtttcaattttattccgctgctatgtttttcccatagctgtgtgagacacagcttatttttctgtgtgtctatccccgctatgagatgataaaaatccctgccttgataagatagagaacttacaatctccctataggtttttgactccttctctactaggagcagacaaatcaactttatgggccggttatttctttgttcttctaatagcatccctatctttttatccaattctctgcagtgggaatgaaggagctccgggatatgtacgatcacaaataccgcttgaaacttcttcccgcatctggtatgaacctccatttctccatcctgcccgaaggtgtactgatggctgcaatcatactttcttgcagccagttccccatccaccttcatatacttccaggacttgtctaattctatttccagtaaatctttctcaagtccgggaaactcaaatggtttccatttggaacggtttttcaagtcaggatatgatattccctctacttttccgaaataatagtatgtacccccaacaaatactagaaatactgctaagacccaccaatgaatccattttccaaatctgttcactggtactccatgcttgcacatgattccccaagctataataatcgccatttggaatagtgcatgtaattgaaaccagaaaataccttttacgccacaaaagaaaatgtattttctattcttgcatactggtgtaaatatgattgtaatcctgtatttgtctgtacaccaacccagtccgctcaacaccgctttgagctctcatttctaaggtcagagaaagtctttaaccactccttcagcttcttcatcttcttcccgtccattgtatagatctcgcatactgcgaaacattccactctttctgccgctcctggccgttcctccaataagttcccttcacctgctattctccagttttgtttcagaaccaactgcaaacctatattcaggaatctctcttcatattcccggcaaagctttccgaacatctgcatcattttgttttcatgataaatctgccttcctatttccacgtcttccagggccgccactttttctttgggataatattcatatttgattctttttatgtaatcctcataggaatatgtgaagtttcctacaatataaattttttccttgtcataggcggtatccctaaatacctgttccagttcctcacggaatctccaatatacctcctcacggatatatataagactttccacatgcgtaagcagttcggctagagattcaaatatgcattcaaaactaaacaaattgcttccctttgatttgtaaattatactaaaattatttatagaataacctctttcttccaaaaacttgacacaatccgcatttctgtgaaccgtgacataggcctgctcccattttcttgtgctgccatctgctcttttttcttttaactcaatcggagtacgggttcctccgcccggacccggactactatgcacactatatccatttacaagacaaataactttcatagcgtcatatggaatctctttctttttcccaaaagaaacacacttctccctataaatgtaatatggccttaaatatatggtcttgtacattaaacaccaaaaaagcactataaacaaaaccactaccggtataaccaaatagcattcttcatttctgcttaataatagtaaaaaaataattccaaaaagcacgccagaaattatataatattgtttaactgttcctataggtgccgaaggctcctgccaatactttttcatcttctcaccccagtgaaattcttatacagttttaatgttcctctaattattatacagcagtttacaagttttttctaaagttaggcaaataatatcataaaaaagacacacaatcgtccccgcctgttgtatgataaaagtgaccaaacaaataccattcagaaaagggatgattgctcttccttctatggaaaacctctttcttctggtcttttccatgctggccctggactgcttccgctccatacgctctgcctggctccatttgatctctaaattcacaacaaaatccctgaatttcttctactatacgctggaacacgggaaatttgaccattcgcactggctccttgtttccgtccggcgcgccttgtctgttatcccttcttctttaaaaggctgtgccgtatttctctcaatcgatgatactttggtgaaaaagtttggtctgaagttccaggcctgctccaagcttttcgaccatgctgctcataacggggcaaactatctcaatggccattgttttgtaagtatcatgctccacgttccagtcataggacgccgtggcgtcttctatctgtctgttccattgggataccgcgtgtggataaaggacaatggaaaaagcaaactggccctggcctcggaactgacgcgttctgttagcggttaccggatacggagtgccatagggattgaacggcttgtaaacctggtgtgtatcagttctgctgctgtgcacctgctgccttattacagcagtgaatttgcccaataccagggagaaagttcccaggaaacacgttacctgattggaaaaaagatccgaatggacctgattattatcagcttgggacaatttatcgaaaccatgaaaaataaccagcctgtcaaatccactgccttaaacttgtgcagggaaacccttacaaacggcttccacatggaatggtcccttgttgttttggcaataaaaaaccgtcatttatataatggcaattatctgataccaataaatcccttttagattcggaaagattaaatctcgaactatactggaagcttttttgtataaaggtcttcctatgtcttcaaatattcaattcattcttcaagcttaatctccatttcagaaaacatctttatttggcatagattttctagttctgctttctcttccaaatggtatccatggaaaatgcttcgctttcatcccagtcaagatccagatctgctcccaaagccagccactcctgcacttcttcttttttatccgtatacataaccgccatatgctcatgtcctgaaattgccagccagcaatagccatccctataaaagcacaagtccataggtgcatttggataatcccactcaaaaatatcctctacctgcgtaagtatttccagacaccttatatccgaacgataaaaaaagattttatatatatgtttggtatcccaagtctgcataaggggccatattaatgtatttgtactgtgttccttatatttccgcagttcatcatagattaattttgttctttttttcagtttttcattttcccggtacctgaaatacaccacagagaaaaattcactgtgcagaagcatatattttataaacttcctatatttttccggattattgaattcatttaaataatatcttctcataattcatatttgtaattcgactattttttcaaaaaccgaatcacttttcctttctcccacttatacataggtaatactatgcttttatgtaaatatacttaatataatcatctatatttagcaatcttgttttcccagcatagaaaaaggcctcctgtatttgttataattattataacatacagaaagccatttttccttaatttttcagcaggtccatatctttatacaccccacagactcgacatttcttccccctctgtacctgaacgggtttctctttcctatgatggaggccagtgttcctgtaatgccgatctaatttgcccaactgttatatttatagtttactacagtttctcctgcctcattaaccagtcctatgatatcgttctggacattttgattgtagcaataatcaactcctcccgctgtcaggggcaataacttttctcaacaggctacagctttactaaaacgtttttcttttttgccagggctagaaaagttctcacctaactctggaataaagtacacgttctttcctacaacggctctatgcaagagtgctattttatgacactttttgctgtaatctcaatccgggtaaagatattattttattattcccaaaaatttatgtaatactccttcattaccttttggtattcatccgacagagaactatataattgtggattttctattaaaccggaaagataatctaaccaatttatatcccctagctttagagccgttcttatagcacagctatacgcctcctcaaacacactgggattcatatttttaagtctttcaaagatctcaaaaaaacccggccaattcatatcctgtgtccattctaacattttgaacgaatacctttctaattcttcatccgatttttcgcaaatgaccttggcacagttttgccaaacatccttattaccgatcggctgaaacagcacagaaaggtattttatttttcttgcttcttctattcccttcttctgtatatcttctggattaatatcatttaacatttcaaaaatttcatcaattgacatttttgtcccctccattctatttattttttcctataacatctgccttaactatcactttttttctttgtttctcttgagcagctgtttcgtatattcccaatccaatatagatgttattttactgctgccaaaattttatgtaatgctccttcattaccctttggcattcctccgatagagaactatataattgtggattttctatgaaaccggaaagatgatttaaccaatttatatcctctagctttatagccttttctatactataattatacattgcctcaagtacactgggattcatatttttaagtctttcaaagataacaaaaaaacccggccaattcatatcctgcatccattctaatatttcatacgtatacatatgtaattcttcatccggtttttcgcaaatgatcttagcgcagttttcccaaatagacatattctcaatgggatgaaaaaacacagaaatgcattttatttttctcgcttcttccatcccttttttctgtatatcttctggattgttacaatctaacatttcaaagatctcatcaattgacattttaatttccttcctactccaatactccagccaatatgtaaagagctttctggctccaaataaatataagaagaaattactcctatgcacccttcgataaacatacacatcccgatgattgtggaaactgccactcttctttcatattctctattgctatccatactgttccgttcctccctttccatctttatgaatataaacccgtgcctctttagagtttcgaatcctcttctcaatttctccataaaaatgtttatattatattaatgctgattgacaggtctttattgcatgaagaaaaaacttttcattgttcctcatttccataaaaaaacagatgaaagaaaacatacccttcatctgtttctgcctatctgccttaatttaatccccgtatatcattggctgttatatggagtatttgaaaaagctcctcaaccatacgatcatactgtttcaattttattccgctgctatgtttttcccatagctgtgttagacacagcttatttttctgtgtgtttatccccgctatgagatgataaaaatccctgccttgataagatagagaacttacaatctccctataggtttttgactccttctctactaggagcagacaaatcaactttatgggccggttatttctttgttcttctaatagtatccctatctttttatccaattctctgcagtgggaatgaaggagctccgggatatgtacgatcacaaataccgcttgaaacttcttcccgcatctggtatgaacctccatttctccatcctgcccgaaggtgtactgatggctgcaatcatactttcttgcagccagttccttgtccaccttcatatacttccaggacttgtctaattctatttccagtaaatctttctcaagtccgggaaactcaaatggtttccatttggaacggtttttcaagtcgggatataatatttcctctacttttccggaataatagtatgtagccacagcaaataccagaaatactgctaagacccaccaaccaatccatcttccaaatctgttcactggtactccattcttacacataattccccaagctacaataaccgccatttggaacagtgcatgtaattgaaacgagaaaataccttttacgccggaaaagataatgtattttccatttttgctttttcttaaatatcctctggcatataatggattagaggtatccgcagttttttcataaagttctccaccatagaacaaatgggaccttacaggaagccaatacatgattatgataaccaaacaccacgacaatgcctgtatgaatctatcccctgtctccgcctcatatctgatcaataaaatccctgttaacggtattatccaccttagtacatttttcatacttatatttatcctttccgttttgattacataaactactatagatatgattaccttactgttacgatttctctttaaaataaactcggtatactataaatcggaaggaaaatcgactgctttatccattctaagctaactacatccatttacacaagtattatataaataaattgcttaattctccgtttattaccaactcgcctctttcaattatactcttttccttaataccgctaacaattgtatcaattttcccttcagtaagaccattctttatttgacttactgaagggaatatcctttatttactactgcttttcaaataaactattcaatctcataatctagacaggtattaatttttgtaccatttaaccatataatttggatggtgcgatttgaggatggcagggaacataacccctatgtttgtcatatgctactggaataaaaattacatcttttatattctttcgaccttcgtgatatgatacataagttgtccctgcatatcccactgcacttcctatcatagccattttagtttcattaacaaacttcacacgcatattaacatgtttaatcgttctttcaggaaatggaagtctttttgctgcctttacgcggttaagatatttattatgtcttctatgaaaatcaccaccatcaccgcctaaaaatcccaaggctcctcctaatgctgtattatacacaatttcaccagttgtttcaccttggatccaactagaaatacctcctaacgtagcatttaccaatgcttgtcccaatttattcaaacacgtagttgcaactgcaccactaattgacgaagtcgctacgtcccaccaattaatctctgtaattgatttattttcactaatcatttgagttccaatggaaccaaccgcaccaataatagctcctattgctgctaccacccaggtttttccatacatatcaattctaacagcaggattgttatcacaatatgaaaacaaatttttattatggaaactttgatcgggtaggaggggcttgcgccccgacctcccacaccaccgtacgtacggttccgtatacggcggttcagatagcttaacatgctatagatttataatacttttccattgataatagtccgaaactttcaagtctcttgttggagattgcataacataaagtttctgttctgcatactctcgcataacctagtgagcttgctgcggcctgtgcatttctctcacttactccaagttgtatgagccgcttcttccttgttttgggtttcttccaatgtttccatatgcacattcgcaaacgatatctgaccatgctatcaattttctttgagattgtctgcattgttgctaacttgaaataatttgtccatcctctgataacttcgtttatctttttgatcttgtatttgttatcaactccccaacttctggtcgttagtctttttaattttgtcataacctttttccatgatgactcatgtactcttggtttatatttcttttctttaaataggcaataaaaactatatcctaaaaatttcacctctgttgggcggctttttcgcttttgaccagaatgatgcaatcatccgcatatctgacaaactttaatttccttcgttccagttcccagtcaaattcatttagaagtacattcgagcataaaggggaaatatttccaccttgtggcattccgagatatgactcttcaaatcccccttggctcatagctccgcttttaagaaacttgtaaatcagagacagtactctgccatcttgaactttcttgttcatgattgaccttagtttctcatgatctactgtatcgaagaacttttcaaggtctaaatctacaatccaattgtatcctttattcatgtactcgactgcttgggtgattgcttgttgggctgattttcctgctcgaaagccaaagctgtttggatggaatacaggttcatatatttcctctaatacctgtgcgactgcctgttgtacaaatctatctgtaaccgttggcactcccaattttcttgttcctccatcgggttttggtatttcaacccttcttaccggacttggagtgtattgtttgtgggttatctgatactttattcgatcgccattctccttcaaatagcttgataattccgcacactccataccatccactccagcagcacctttattattcttcactttcttaaatgcgttattcaggttttctttattaagtattatatctatcatatttatgtgtgacatgcgttgtttctcctttgcagatttaagttctgaccactcactgattcctcagtcctctcggctaatgttatgtccttgctcttatctgccgatattccaacttactacctgttcggtccttcgctcctttttggtttcccaaactttcaacactactatgacctctgctgacttcctatggttcgttgttactatggctgatgaaaccacccataggatctccccgattaaagacgcattctttcccgtcatctacctgccgcatctactaccaaccctatgatagctttgggacttcgacctgttcagcggccttatccaggttgtaagccttatatgcgatttctgtccgtcaggccaacgttttgcctcaggcttccttcagattccatcttacgatgaacacctttgccattttgactatgtgtttctcgctatcaagcacacttgggactttcacccttaagaaatacgtccgcgccgggcgaactgaactactcggcaattgaattaccgagcatctatatgccgcaccttcggtgctgccataacgggcagtccatgcgcccaatattgctagtcctttcagacttacacaaatactttctgcggacagttcagtccagccgcttccggaaacggaagtttatttttttgcagatacagacgcaggatattatatgcccccacgcagtctgcattatagatatccggctcatctatatataatccccgatattttcgattctgactttgggcaaacccttttcccactttatcacttttcggactgcactgactgctgtaattttctttctgacggatcatccttattccgtaccgtttcagcttatactccagtttctggaggatcttttcatacggaaaggaatgaagctgctgattgatccttccaagatcctttcccttacgtatccccttcatatctccaattacaaccgttgtgatatgctctgcctgacaatactcagccacatatctggttgttttatgaataagatcagtaactttatttttcttctttcgatatagggaacgtacctttttcgtttttttcgggtacttgatcccacagcatgactgctgacggtcactgatcccctgatatctcgcaatctctttatcaaaataatgggtaatattcaataatccgtttaacagaaatgtcttccctgcactgtcatagcaggccagcatatttttcagtcccatgtcgatccccagataatgtccattatcttcctgcatcggaacatctgtctcttcatatactgctattgctgtatatcttttttcatcaaacttgatctgaatctctttgatatgaatgtctgaaaaccgctttgttttcagataaagatgatcagcatccacaccctggctcttcagataagtttttaactgttttggaatggtcagccggatctttccttcttcctgccggattgcatctttcaaaaaagtaatatccatcttctcttttcggaaacgcggcggtctcggattctccacccctctgctcctcagcaatacaaaaaagcttttccacgcctcttccaattgttggagcacatcctgtgccgtctgtgatggaagatttttataaaagaaattttcttttaaccgtttcttctgatcataccagtccggatatctggtcattccaatctctttgtaattccttttttcataatctgccacattccagagtttaaatgctgcatatcccatatgtcccaaaatgatcttctgttcttctgttggtaaaaatacttctcttctcgacaagagcatatgcattcccctttcctgtcagtaagacttcgtttgtttttcaatatatctgcggatgttttcctccgaaacgtttcctattgtttccacataataggaatgatcccacaattctcccttccataaatatttacggagttccggatatttttggagagtatatcttccaataatacccttcagcatctttacaatatatgagatcgagatcttaggtggtgcagaaacaaaacaatggatatggtctctttctccagcttcaaataaatggactgtgaagcccttctcatcagcggtctccacagcccattttttcatcgtctgctccatgtcttctgtgatgatcttcctgcggtactttaccggccacaccacatggtagttgatattatatacgcaggttcttgcatgtatcagattttctttcatgcatatagtatacactatttcaataagcagagcaatatattgccgaatgtctgttctctttttataggctggatacagccactattgtttcgtgcagaaatgcacattttgacgctttcatctcggcaattgaataaccggtgattcccgcttgctatcctaaaattcctcatacattgggattcttctaaaaataatgcttgctcttatagtttaaaaacatcaaatttgtctttgcagcattctcaaattgttctcccaagcatcatcttccactgcttttgcatatttgagacaagtattaagtgccaaacaaaaataatcatcatctgcatatttttgcaatctatccagtatacaaaaagctccaggccaatttaaatcttgcagccatgctaataattcaactaaatatggagttaattcttcatccgttctctcagataatattttagcacaattatcccaaacatttttgtcatattttttattacaaggttgcagaaacacatttatgtttacaacatctttcgccatttggattccttttacttgatcatctatatttttattccaatcaatcaagctcataatataatcaatattaatcattttaatttactccatcccatttaattacaaccgattttacagcttgtgtccaaacagaacttgaaccagcttttatccaatcatccatggttccgccaataggtcttacactaatatgagttgctccatcttgaactgcatatacaagcccagtcgcatttaaagcttctatcgtagttttagctgagcctggctttggtaccgtactgaatgatagacctgtttctctatctttttgctttggtgttagattccccggattagtaccgccatatctgtagatgaccacatcctttttatttttttctataacatttgccttaattttaacttcttctctttgtttctcttgagtaactgtttggtatattccataaatgattacccccgcaccaactactatatctgcaaacggagctggaccgtctaaccaagttaatgcagcacctccagtagccaattctggatttcccgttacagcttgtgcaatagcttttccaattcccacaaaaaatgatatagcaccttcaagaaaatggcctgaagaatccagacaagtaatgggattattcgaacagtattcaaacatattgcaactgttaatcccctgacccgttgacatatagctgtctgcactaataaaccgtctagcctccgggctataatacctgctttgcagataatacatccccgtctccccatcatagtaataccctctgtacctaaacgggttcctctttcctatggtggaggccagtgttcctgtaatgctgactggatttccccaactgtcatatttatagtttactacagtctctcctgcctcgtcaacaattccgatgatatcgttctgggcattccgaatgtagaaataatccactcctcccactgtcagagaaatgagtcttgccgcagaatcgtagttataccagaaggtggccccattggttttttccgatacgatcaggctgcctgccatacggtattccgtggtcacgccatccacaatcttcttggtgcgcattccggtgtggtcatagaaatattggatgttttttccattgttgacaccggaaagctttcttccctgggtccaggtatatttcgtgtttccccaggtgagcagatttcccacagcatcataggtcatggctgctccatcccaattcaccagcttgtccttccatacaggatcataggttcccgtaatggtcttcacaggcgcggtgggaagggtctgagcggttgtaaaggcatattccttaacagtgagcaaatttccgccctcatcgtaggcgtaggtgatggtcttattaaccacatgattattctctctgatcaactggtttaattcgtcataagcataggtactcgttccggcagaatccttcatactgatgatatttccgttcccatcgtaatcataatccagacgttctgtcccgttgagcattactcttgggaggctgaaccggttgtttcccacattgaaatagctgtaggcagtcttatattccgcagtggtattccaggtctgggaggaaagacggcccagtccgtcgtaggctgtggtcctggtatgtccatgaggcttggcggttacttccctgccgtccttatcataggtataatctgtgtagatgtgggaaggacctgcgctgtggtacatgcgggtcatattgttttcagcatcataggtatattgataagaattgccctgttcatctataacacgcataaggcggttcaggaaatcataggacatgcggtaggtttttcctgccatatgggctgtggcctgctccaggtttccctgcttgtcatatacatactcatgtagcttcacctctttgcctgatgccttgctgtaataatagctgagagccatgcggtccatgtcatcataggtataacggatagaatcgccgtttccatacagagtcttcttcagatttccattcttgctgtcatattcatagctgatcacctgggttcctgccacagaggcactcttggtattgccgaaggcatcatagacaaaaccatactgaaaaccattgtggctgattccggagagcctgtccttggtgtaggtataggtattttttatttccttctttactccgttcactgtcacactctgtgccaatgcagtcaggcggttggcattgtcataggaataattgatgatatttcccttggcgtccgtaagcttgataagcaaatcctttggcttgtcccactgataggtaacggtgttgttcctggcatcagttacggtccggatatgattggaatctgtggtaaaggttctggtggtccaggtaccaatctcagcattggagctggaaactgttccgctctttgttacatttcccatgctgtcatattccagtttatagatcacgttttctgcagaggtgccttttgtcacattgtgtttgctgtcatattcataagtgaatttattccccttggcatctaccactccggtcatgtcgttggaggcattgtattcaaactttctggcctttttctgagcatccaccacagagatcagattattttctgaatcataagtataggtctgtccaaattcctcccggaaaagagataagccatcaaaaaacgccatatttgcatttctgcagtaggtataggacaccttaacgctggtataatcctgctttgccacatacacgtcgcttaaaaactgccagtccagaatatccgggctgaaattggtataatgcacatcggtcttgccggccgcgtctgtgaagatcacctccaccccgaacctgcggtccttctcattgtccgtctccggcagggcatctccccggccccaggcatttaccatataggtatcgcccttctttcctgttagatccagcgtcttggtaagctttttgtccatggatggatcacccatgaatttaaaaatatgctcttctaagcccccaacccgctctgtgatggtttcccttatgagctttgatacaatgggggaaactacaagctccagattccgttccggcaggaagcaaaattccataccctgaagtacagcataccacttttcaccgttgcttttctgtaccacaccccggatgagaacgatggcatcttttgctgctgttcctgctgctgtgctggtgaaggagggtccatggtaaaaggtgtctgctgctttcatttttccataggagtcatttctgctcagacggatcacatcatctgtgggtaaatatccatgataccggttatttcccacatgaaggcccacccggtaccattttttattggctgcatccaactttgtactttggaggaccagataggtgccttttggtatgtagtaaagtacaggagctgctgaatctccggcgtctgcgcgcagagttggattggtaactgcggctgctccggtattgagtccgctctctcccgctacataagggattaccgaggcggagtggatatacccggactgtcctccttgggttttcacccgataccacaggccgttatccgttcctgtgagaaagcacatggaagctacatggctgccgctgtacacagtagccgtcttcgtataggtggttcccggaccgctgtaaatatctgcggacgccgctgtcaccagcaatgcactctgtaccggaatgtattcctcagtattaatagcagtaagctgatcctcggcttttcctgtttttgagaagcctgcagtagttcccaggtaaaaatctccattttccaccaaattgcaccggttaggtgtggtgcctggttccaactgagccatatccccatagtactgtcctttgatatgatacatatacagggatacccgcacaagattgtccttggcatctgccggaacggtaaaggtagatttcagttgaagaaagcccggtgtagtttttgtaactgcttcactgtctgccaggatattattgccgtccttgtcatgatacaaggcacgaataaagcatctaccattggttcccacctcttccacagcggcccgcacatacatggacagggtataggtctcacctggatttacccgcacactctgagcccaatagccgcttcctgtagctgccgtactggccagatgaagagagcgggtgcccaccttcacatatccggtattggtgttaatatcagccgtcaccgtactgtcagataccgttgccgcccagcctgaagtctgggcctgaataatggggtccttcaaaagctgtacaatgttatcctgaagcttggtctgattttccaaaaggttcacatgattgccgtcccggttgtacttgccgctggcagcatggccaaagccgtcatggatatgcaggaggtttcctccattgttaaaccggcagatctcgcttcttcccttattgtccgtaaattttgtgctgttatagccataggtgagctgaaggctttttccttctgccgtccccccgtattctgtgattttctttacacggtatggctttaaaccataataggcataggtgactttatagccatccacatttaccgctgaggtgagcatccggttgctgtcataggtataggtcatcctctctccgtcaatgtccgtgatggccgtcaggtttcctgaggtataggaaaatttcttaacctgcttggaaggagaggtgatttcacttagataggtaagcctgccttctgcgttctgcaaataggtcaaggtggttacacggccggcgccgtcagtgatttttgtaatccggttatccgtgtacacaatacttaaggtattgccattgcggtcctgtatctttaccagaaaaccggccttattaaagaccatctgattatcctctttgtcctttaaggtaaaggctgccgcatccgttgtaccgatcgtcagagtcagctccaggccggattcatccttccatttctttttctcctcatcgtaatagaaataatggaccgttccgtctccgtccccatactgataataatccctatctgaaatggtaacctttttcatagtctgctgatagctcagccgaaaaccatagccataaccaagattcatggttctgtcattggtattgtacacatgtgacagggagacaggcatacggcttccccccataagcagcgttggatggaccagaaccaggtttccattataatcgttcacatggatattacctgcccttcccacactctggctgtgataggtccaatagtcctccagaccagaataatttacataggaaatctcgatcctgggtctcatctccttgtagccgtcatggcagtcagatgccaggaattctgtgtagccggagagctcctccgggtctttgatcagcattccgtagttgccgccgttctggtaccagtccttcaccagattggtaatatccagggtcacatatttttgttcatttcctgtatatttgcacaaatcctgaattttttcttcgtacacagggcgattgttccaggtgagggttgcggagctccagtcctgaaggactttatgtacctgaatgatacgctcctggccgtcctccgccagggacaccatcaccagccgggcatggactaccatatccgctgccttaatctcaggaagctggaatttcatatagcttcgctggatattgtcgccgcccatggttttaagaaaaattccatactgataattggtctcagaattcaaggaatccacatgggcatcgtaaatatcgtctgccttcttagaggtagtgatcactgggtcgatcaccaccggatactgccggtctatggcctgaagccactgggcatccggggtgacggtgatacggtattcatccttcttttttccatcctccagggagatctccacggactctgaaagatgatttcctgcatccttcatgtagggagccagcagacaaaatacctcctccttgtcatcattgagaaacgctatggtgtttcccttttgacagggatgcagtccctttaaacgataaatgtaagtgaagctgctggcagcgcctttgttggcaagcaccagattctcttttaccttttctcctatggtacggtatcttgcctccactccttccagaatttccgggtaggaaatttccttgtcgctgatctggagggcttttgtcttattggtgccttccagtgcccatgcaaggcggtactggtctttgtcaatacgcacaatgccctgttccctggcctgcctgaaaaagtggatttttagctttccctttttatttacaaaggctttttcttcattggcccggttttcttggatattgtctgcagcttctgtgtcttcttctgtaagacggtcgtccatgtccttccaggtgccgtcctcttcttgaaaatgaacaggctccagataaatctctgtggtaaaggaatggtcttggttttcaaatactttggtatttgcggatctcttttcaatgacttcttttcgttttaaattcttcatgggtcttctcctctctttttttcaggggactgctgccgcagcccgcctgctgttccataaaaatcgtgaattttgcttcctgatgaggtcaatttaatttcttgatcactgcatcaaagcccgctttttttaactgttcaagaagcttttgggcattgctttcttttgcaaaggctccgcactgtactgcatagaggggtgcctttgaatgagtggaggaatctggtgctccaggagctgtgaagctcagatccagtccttccagaactccctttacaatagcgtcagccactgcctccttgtgggtcctatagaacttcatatcatccccgtcatcaagaaaggccgtttccagcaggaagtagggcgttcccgcactccaggaataattgcagttacacagctcactggtagtacacagattccattttgagaaacctgttttcacgatccgtgcaagaaccttctctgcaagaaaaggatcttccccgtcatggatgtagcctcctgtgcctgtaaatcttccatctccctccggatccttattcacctttgcattaaaatgaatctccagaacaagatcataggctctatagtccgggccagcgccctttctggtctgctggtagcagtcctttgccgtatcgtataatgtgacggaaaccttctgctttgccattcgttcatatacaagccctgccagttctctggtcaggtctgcttcctgtccccatttcgatactgcaccgggatctccttccccgtgtcctgctatgagcaggatctttttataactcatttttctttcccctttctgtgtcctttttttcttctttttttctttccagcttcagctctgtcctgtaggcctccgctgcgatggcttcctttgtgaatacgttgtttttccaccagacccacagggcggtgcctatggtgagcaggccgctcacaagctgataccattcctcctctgaaaagggcaggggattcttaccggaaagctcaagaagctggtttaaaagggtgatgagcaatacaatggttctcacccatgtatccttgggtaccttcatatgaatctgcctccttcctgagatacctcctttctagttgtgccatgtcgtttgtgcacgcttgtatctgcagcttctttacgtttttatattagcaaacatatgttcctacttgaatatcagaactgtataagtttctaacacttttgttaggtatgtgtgctgtcactggtttttgccggcgatctcctccatggatacctccaatacctgtgccatccttctcagcaaaagaatattcatggccgtggcgccattctcaatgcgggacacagtcatgatggacacccccagagcctctgcaaaggtttcctggctgtagtcctttctttttcgaagggttttaacgtgctgcccaatggcgatcaattcctggttaaatgttttttgcatatggttcctccttaacaatcaagaccaaagcggacaagcccgcttcaactccccatcccctcactcattaggggcttggtagctttgtgtgccaatgtgcagctgcgaagcagctttcccttgtaataaaaaagccaggaaaaagacgttccatttctggattctttttcccggctttgaacctagcattctggctgctcactcggtctctatgtaattttctgcttgtgataataagcggtgagacgctcctgtctcttcttcccgcagttttccaggagaatctctacctcctgcctgcacaggggacatttgatcctcaccaccccgctggccgttccctgaagatcaaacaatcgcctgttggaacattttggacaatggaccattgtcactgctcctgtctcagcttcctttttcaatatcatcaccccgcgattctctcctatgggacacgcacttctttcgccctcaagagttttcttatttataatataagaacatacgttctaaatgtcaagatgatttttttcttttaatagtaccatttacggcactaggaattttcatacctatttataggacatctgtgtattaaaaatgccttcttatacagaacagcaatgctatcactgttccatacaaaaaggcacaattcaatctcttattccgccgcctgtgcagcctcagacatcgttccggtctcctggctgccataagggtgtcactgcctgcggttgtattttacaaaagagtactccagatcaaaataggtctgctcctcactggacgccgcgatctcccactcaggcatttcatccaggttggggaaatagctgtctgcctggtaggcatagtcaattcttgtcacatgggctgtatcacagtagggaagcagctgatggtacacactgtctcctccgatcacatacacctggtcactgggatacttttttatctcctccaaaagctccggaagggtatgcaccactgtggctcccttcacctggtaggaagggttggctgtgagcacaatatttgtcctgtttttcagagggaggccgcctggaaagctctccagagtcttccttcccataaccaccaccttccctgtggtctcctggcggaaaaatttcatatccgcaggtatgctcaccagcagcttgttgtccttgccgatggcccaatttttatctactgcaacgataatattcatacagtctgtttcctttcccatatctgcattttcatttcacctttactcacgcctgaagtatatctgctatcctaaatggcaatggggatattcttgatctggggatgactctggtaattttccacaatgagatcctctgttgtgaagtcatagaaatccttgatctccggattcagcctcaccacaggcgccggataaggtgtcctggagatcagctccttcacaatgggcacatggcggtcataaatatgacagtctgagatcacatgaagaagctctcctgcctccatggagcacacctgggcaaacatcatcagcagcagggaatactggcacacattccaattgtttgcagccaggatgtcctgggaacgctggttcaggatggcatttaaggtgagcttgtcctttccaggttcctttgtcacattaaaggtcatggagtaggcacaaggatacaggtgcatctcgtggagatcctggtgcacatatatatttgtcatgatccttctgctgtagggattgttcttcagatcccacagaacccggtccacctggtccatcatcccctcttgatactggtgcttcacgctcatctggtagccgtaggccttgccgatggagccggtgtcatctgcccagctgtcccagatatggctgtgaaggtcatgaatgttgttggactttttctgccagatccatagaatctcgtccatggcgcttttcaatgcggtctttcgcagggtgagcgctggaaattcttttctcaagtcatagcggttcactaccccgaaacgcttaatggtgtaggctggtgtgtgatcctcccatacaggacgcaccttctctccttctgtgctggtgccgttctcaatgacatcccggcacatgtcaataaaaatatgatctgcaaggctcatgcttataccctcttcctttcatttgcttatgaataatcgtcaatggaaatatctgctggcacagacattgtcatgaatgaaagtttatcacaaaacccccattacgtaaagagaacttcttttcgccctctggacaaattccgggaatgatttttcgggaatcgctggacaagattatttttcagtgctatattaagtgccatgaaagtacttatccatttattaaaaccattgtcgtttctgcctgcaattctcatgatgtatctgattttctcgttctcagcacagacaggggaggtgtctggacaactgagctaccggatcagttacgagattgtggagaccaagaacgaactcctgaacctgggacaaggtcctgatgagctttattctgccgccgagggcattcattactatgtgcgaaaggcggcccatatgaccgaatatttcctgctggccctggccatctcctttcccctgtatgtgtacagggtgcgcggggtgtggctcatgctgctggcaggcattgtctgtgtgggttttgccggactggatgaataccaccagtccttcgtagctggcagaggcccagccgtgaaggacgtactgattgacagtgtgggagcctttgccgggatcctgctggtccagcttttctgctggtccactctccatgcccccgggcgaaaacgcagacggaaaaagcaaaaaaagtaaaaagaagccccctgcagttctctgtcccagtgtgagacaggccctgcagggggttctttcttttattcctgttcttctttggtttcctcagaagcagctgtgctctgttccatggcttcctcgttctcctcttcctctgcaacaatatccagatgctttgccagatttgctctttcagaaatactcatcttcttctgctgctggacttcctgcttcactggctgagacacttcctcttcctgggccgcccgctgtgcctcttctttggcaagcttatcttccttcaaatagcccttcagtccgctgtagaggaaaaacgcgccaaacaaaacaaaggcaacggctgcaatgggaatccatgcgcttgtgctctgtccgctctgcactcctttaaacagactgtaggctgtataaaggagataggctgccgccaccatacgcagaatataactgaatttcatgtttacgggtttttgcgtgggagaactttcttccttggaaggctcttcctgtggttcctgggtctggggggtgacttccgtgatttttttctcttcttccatgtaccttactccattctttcacttgctcaggatacggcgaactggctttcatacagtccggcatagaaaccgccctttcggatcagctcttcgtgtttaccctgttcgattatattaccatctttcatcactaaaatcaaatccgcttcttgaattgtggagagccggtgtgccactatgaagctggtccgtcctttcataagctcagcaaaggccttctggaccttcacctctgtgcgggtgtcaatggaggaggtggcctcatccaggatgagcatggctggatgcatgagcatcacccgggcaatgcacagaagctgcttctgcccctgggagatgtttcccccgtcctcagcgatcactgtgtcatagcccttgggcatacgtttgataaagctgtgggcatgggcctttttggcagcctccataacctcctccagggtggcgtccggtcttccgtaggcaatattttcccggatcgtccccgccttcagccaggtctcctgtagcaccattccataatttctgcgcaggctgtctctggtgatctccttgatgggaagtccgctcatgacaattctgcccttgtccacatcataaaaccgcataagaagattgatcatggtggtttttccacagcctgtggggcctacaatggcgatcctctggcctggctttacatttatggtaatatcctgaagaagaggcacctcttttctgtaagagaaggagacctgttccaccttgagacttccgtctgcatggtccagcaccctggcctggggtaagtccgggggtgccaaaggagtatccagaaaatcaaagatcctctgggcacaggccagagcattctccagctctgtgaccacacctgaaatttcattaaaaggttttgtatattggttggcgtaatttaaaaaactggtaagctgtcccaccgtcatggctcctcctatgacagtgaaggctccgaaaattcccacgccggtgtacaccagggagtttacgaaacgtgtagaaggatttgtgatggaggagaagaacagggccttgatcccccacacccgcagctcctcattcaccttcccgaagcgctcctgtgcccggtcctcataggaaaaggcctggacgatcttctggtttcccaccagctcctccaccagggaagtcatctgggctctcttctctgactgctcccggaacattttgtaggtgcggctggcaatgaagctggccacaaaaagggagacaggtgtgagaaggatcaccagaatggaaatcttcacattgatggacatcataaagccgatggtgccaaatatggtgatcacaccagtgaagagctgggtaaagcccatgagcagtccgtcggagaactggcccacatcggtgacgatcctgcttagaatatcacctggctggttgttgtcaatgtagctgatgggcactccctgaaggtgggaaaaggcctgggcccgcagctcctgcaccacccggtaggtgacctggttggtgagcaggttcataagccactgcgccactgctgtcacggcgatgacaacagccagctggatgagaacctttacaagggcggccccgttcacatttcccggccccacgatctggtccacgccacggccgatcaagatgggcgtatataaggtaaaggccaccgtcaccgccgccaggaccagcataagaaaaatcctgactccctggggcttaactagcttcagcacccgtttcattgtatctttatgcttcatcagcggttcacctccttctctgaaagctgggacagacagatttccctgtaaacctcacaggtttttaaaagctcctggtgggttccggctcctgccagctttccgtcatccagcaccaggatctggtccgcctgcttaatggaggtggcacgctgggatacgataaacacggtcatcccttgggtcttctccctgatggcccggcgcagggccgcatccgtggcaaaatcaagggcagaggcactgtcgtccataatcagaatttccggcatgcccacaagggccctggcgatggtaagcctctgccgctgtcccccggacaggttggagcctccctggctcaccatggtatccagtccctctggcttggccttcacaaactctgctgcctgggcaatggaaagggcctgccagatttcttcctccgtggcatccgcttttccccagcgcatattgtcccggatggttccctgaaacaagacggcatgctggggaaccatccccacctttccccgaagctggtcaaagggatagctgcgggtatctacaccgtccaccagcacctgcccttcacagctgtcataaaaacgtgggatcagattcaccagggttgttttgccgcagccggttccgccgataattcccacggtctgcccgggctgggcctggaagctgatatcctcaagggccggctccttggtccctgcgtactggaaggtcacatggtcaaaggctgccctgggcgcccctgcctgctccctgcacaccttgtttccttcatccgtcagggtggcccttgtgtcaaagacctcgtttaaccgactggcggaggcggcggctttcgtcacagccacgatcaggttggccagtgccaaaagggccagaagaatctggctcatataatttaccagagccaccacttcaccctgggtgatgatcccaagccttacctccctgcctccataccacaaaatagccacaatggacaggttcatgatcaccagggtggcaggattcagcagcgctgagatcttacctgcagtgatctggatccttgtaaactggtcattggtctcctgaaaatccttcagctcctcctgctgtcttccaaaggcccgcaccaccctggctcccacatggttttccctggtaataagagagatccggtccagggcagtctggacctttttataaataggaaccgtccacttcatgatcaaatagatcaccaaagagatgagaggcactgcaataagaaagatcaccgccaccctcacattgatggtaaaagccataaatactgcgcccaccacaataaagggggagcgcagaaacaggcgcagcaccaggttcaccccggtctgggcctggttgatgtcactggtgatcctggtgaccagagtgggagttcccagtgtatccagctcctggtaggacaaggtgccgatatgccggaacatgtcatttcgcagggcggtgctgaagcccatggccgcctttgcagaaaaatactgggcggtgagggagcatccaaggccgatggcccccagaaggaccataaccacacacattttccaaatatacgctttatcctggtttttgatgcccacgtcaatgatgccagccataaccaaaggcacgatcaattcaaaagcagcctccagcattttaaacaaaggcgccagaatactttcttttcgatagtcttttagataacgcaatagttttctcatactttcacttcctgccctttcaccgggcatttccttgtttttctgtctttcccccgctcaggcggcatgggttccttctccggtcagatccttccgtagagcttagccagacggtgcattttatcaatggtctctctggagagctgtcctttcttcatgcgccatttccagttatccccaaaggagcccggaagattgatcctggcctcgctgccaaggcagagataatcctggatggggataatagccaggtcagccacgctggagacagccgtgcggatcagggtccacacacagtcctgtacaggcttttcctgacagtctgtgtattccctggcaaaatccaggtcatggccatagagggattcgtaccagcctctggtggtgtcattgtcgcaggtgcctgtatagaccacacagttcttatcatatttgtggggaagatagctgctgttctcacttccgtcaaaggcgaactgaagaaccttcattcccggaaatccggtgtcatgtacaagctgcagcacgctctctgtgagaaagcccaggtcctccgcgatcatatccaactccccgatcttgtctgagagtgccttaaaaagctccagaccaggtcccttctcccagtgcccgaactctgccgtgggatctccatagggaatggaatagtattcgtcaaatccccggaaatgatcaatgcggatcacatcatataactcatagctgtgctccacccgctggcaccaccaggaaaactccgtggaccggtggtattcccagctatacagaggattcccccagagctgcccggtgctggaaaaagcatccggaggacagcctgccactgccaggggatgattttcctcatcaaactggaacaacagagggtttgcccaggtatcggcactgtcaaaggccacatagatgggaatgtccccaataattttcacgccattttggttggcataggtcttcagccagcaccactgcctattaaaccaatattggataaaacggtagaactgcacgtcatccgccagctgctccctgtattcctgaacggctctgggactgcggttcttgatctcctccggccagtctgtccagcactggccgttaaaatgatttttcactgccatgtacagacaatagtcctccagccagtagccattctttcttgtaaactccccgaattcattgtcatgctctttcccctgctgtttccaggcttcaaaggcttttctcaggaccttataccgattttcataaagcttcccataatccacataggattcgttgtctccccaggaataggcgttcagctcctggtctgtcacaaggccttccttcaccagcacctccagatcaataaaatatggatttcccgcaaaggtagaaaaagactggtagggagaatccccgtacccggtgggccccaaaggcaggatctgccaatacttctgccctgctgcgatcaactggtccacaaattcataagcctcttttgaaaagcatccgatcccatatttggacggtatgctggaaatcggcattaaaacaccacaagctctcatcttgttatcccccttaagtattgtttgtttttcataaaactcttcatcttttggttcttatttttaatttatttatgcaatttgcacaacataacagtactattataccagccagcttctgacaggtcaacaaagaatccctgactgacggacagcgtttttatatggccagctccagtccccccaaaacccagtgtggtcccgcccttttaccagcttttaggcagaaaaagggactgcctggggggaatttccccctgcagtccctgacaaatacggtcataccttccaggaaataccttcctcctggaaaaccagctctccctgctccttggcatttacatcatccccgcatccggtgacacaggaagccagaagaaggaggcacagaagcattgttatttttttcatcacggcaatccctccatttccaatggtagtatgggcaatggaggctgttttatacctgctacaggcctttttgtctcaaaaatgcatcaatgtcctggaaaacctgatatttgtctttttcatttaatatttcatggcgcatgcccggatagagctttccttttacgttgtgataaccagccatgcgcatagcgttcagggcctgggcaaattttctgggtccgccgatgcagggatcctccgccccgcccacaaacaatatgggaagatccggcttggagcacttccaccctttggaggcataggcctgcttcatcaggtcaaagagcaccagataggcatcgtccgtaaaagtaaatccacacaggggagaggcctcgtaggcttccaccacctctgggtccgcgcacacccaggcaaaccggcttttctcccccttaaatttagaagcaaaactcccaaaggacatggcctctatgagtctgcttttgtgtctggggccctgcagcagaagctctgcctgagcaaggacagtgcctacggccctggccggattcttgctgggagagccgcacacaagaagggcatccagcctgtcatcctgctttctggcaaaggcccgcacggccagtgaccccatactgtggccaaagaggatcaccggcaggtccttgtactctcttttcaccagacgctgcaccagaagaatgtcatccagaaatgcctccgccccgcctccgtacatataccccaggtccttctgggagatgacgctttttccgtgtcccctgtggtcatggatcacggtgacaaacccctgctctgccaggtattccataaaaggaagataccgctccttatattcgctcataccgtggaccacctgcacaattcccctaagagcagctccctccttgggctttaccagcaataccgagagcttaatgccatcctttctggactttacctcttttgtaatcttctcacacataaactcaccctttctttctgttgttatacagaaacatcaatacagccatggtacagatgaccaggtatcccagccagctccacccgtccggcacctgcccgaatacgaaaaagcccagaaccgcagaaaatatgatctgggagtaatcgtagacggagatttcccttgctggtgcatgaaaatatgctgccgtaatggcaaactgcccccctgccgcactcaggcccgccaggagcaggatcccaagctggactgccgtcataggatgaaaatccccaatcaggaagggaagggtcaccccacaggaaaatcctgagaaaaagcataccacaaaggggcccttctcccctctctcccccagaagccgcacaaaggtataagccacgcctgcccccaggcctcccgccagaccgatgagcccataccccagctccagccccgctactgtgggcttgatgataaacagacttcccgcaaaagcgccggccacagccagagcctggggaagcttcaccttttcctttaatagaaggaagctgaaaataatggcaaagaagggggacatcttgttcagcatggaggcgtccgccaggggcaaatggtccacggcaaaaaagttacacaggatccccatggtaccaaacacagagcgcaaaataagatatttcagattttccttctttccggaaaacccgatccctttctttttcatcataagcaaggcaaaaaagaaagccaccagatttctgaaaaagcttttctgaatggacggcagatcccctgaaagccgcacaaacatattcatcagcgcaaagcagaaggctgacagaatgatatagagaattcccatttgttttttctgtattttattgttcaatgtgtcatggccattcctctcttttttttctttctatcttagcacaaaatcccttcagtgaaaatgttttcaaacatcttttaagggataaaacctttccatcccctaggatttctgttataatgaggtttacgaaaaaaagtgaataaggaggaattatggaagcaactaagacaaaatccagtaaaaaccgccgtacctggctgatcctggttctgattttaatcgttgtcctcattgcaggcggcgtaacctatgtatattatcagtatacccagcccaaaagagctcttgacaactttctgaaggatgccaaggcccttaatctggaagccctggcaggagatctccaaagcggcgatatcactccccttcaggaggctgacatagatgatccggcctatacggactttttccgaaaagcaaatgaactcatgacttacaagattaagggcatgagctttcacggacagactgccacggtaacggcagatatccactatgccgatgccacagatatttacaagagcgccatcagcgacttcatgaaacaggtggcctcagcggcctttgccggacaggaaatgtcctcagaggagatgcacacccagcttgcagcgtatctggcccagcattcccagaccctgggagagacctatgcggacgtgaccattgacttttatatggtaaaggagggcggaaaatggtatgtggacgccctggacgacaaactggtgcaggcaatgtccgcaaactttaagagtgtggaaagccagcttgcccaaacgggaagcagccaggaggaagcagcgcctcccgtggcggctgcagacagccggatcgacctgaccacagataaattcaccatcgcctacacctctcacaaggtatccaaggatttaggcggcagtccctgtctgctggtgtattacgattataccaacaacagcgatacagcctccagcgccatggtggatgtgagcctgcgggcataccagaacggcaaaagctgcgagcctgcccttgcccaagacagtgatcccgccattgaccagtatactactgagattcagcctggccagaccgtcaatgtgtgccaggtgtttaccatcacagatacctctgatgtgactttggaagccagtgaggcttactccttcaatgacaatacctctgcccagcttctgaagcttcagtaatttatatggaaaaaattcccatccatttctgggtatactttcatccttgtgtacaaacactaacacaaaagaaaggatggtgtatgatgggaaataaatttatgagatattttgcactgaccgtagcggtcatcggcgctgtgaactggggccttgtaggtctgttccgattgaacctggtctccttgatcttcggaaacatgacttggatctccaggatcatttacacccttgtgggcttatgcggcctgtatcttctcaccttctaccctctggtggaggatgaccccgctgcccagactcagaagtactaggagcgcacattatggataattcccgtacttcccaagattccaaggaaaaacaggaatttgagatcgccgatctcccggaagcctgctgcaagaagatccatgagtttgagcaggagctgaacaagcagggcttttggaacattgccctggttgcctaccagatgaaaaattaaatagtattttccaggacaaaacacttttcccgggaatgataaaaggacactctgctttggcagtgcgtccttttatttctgtccattgggggctttccatatggctctccccccatggcataggtttatgttcttttattcatctgctgtaaaggtatagacctctttctgtccgtttgtgagcacttcataagagacagagccgttatctttcactgttttctcaatagtggcagcccggctggtattctctttcatataagcatccagatcatcggtttccacatccttgatggacgattcaggtttcccgctgcacaggtcaaaaacttcatggatcaattcatacttcttcataggcacgccctccttttttgtacaaacaattgcttcaatttctcagaaactttgttactatttcttctattgtacatcctatagcatcatctgtcaaggttttctgagaccagttccaccaaagtttccccgatcctgtggtttgccacctcatgaacctcaatccgcaggccggctgtctgacagacaaattcttctccgtcatttggaaccctgccaatggatccgcagataaaaccgctgaaggtatcgtaagtatccacgggcagatctttctttatctcctgggccacatcctccagatctgcccatccctggatgacccaccggccttcctgcagcttctggatatcctggggtctttccgcctcctggctttcctccaggtcccccaccagggcctccatcaaatcatggagggtgacaatgcctgacacgctgccatattcatccaggacaactgcaaaatacatgcgtgtctccttcattttccgaaacagcacattggcccgcattccctcaggaataaaccaagcgttatccacagcattggctaagactgcctctcttgacctgtccttggcccggaaataatccttggtatctaaaattcccagaatatcgtccaggtcctctgcacacacaggataataggtgtgtctgctgccggaaataatctcttcccatttgtccatggaatcctccacagagagactgaccacctctcgtctgtgggtacagatctcttccacggtaatgtcatcaaattcaaacacattctgaatgagttcattctcctctgccccaatggttccctgttcgttcccttccataagcagcatacggatctcctcctcggagaccgtgtcctcctcctcgtctgggttcatccccagcagacgcaggatcagattggtggatgcagtcagcagccacaccaggggagcaaatacctttgacacaaagtacaaaagtcccgacatgccaagggccatggactgtgcttttttcatggcgatccgcttgggcaccagctctccaaataccagattaaaataagccaatatcagcgtgataagaaatacacaggcggattttaaaatattctctggaaggtccactcccatgccggataaaacttttaccaacggccctgcaaaattctctgccgcaaaggcgctgcccagcaggcctgccaaggtgatggccacttgaatggtagccagaaaccgcgccggctgctctgtgagtctggacagcttcactgcccgtttgtccccctgtgctgtgagcagcctgagcttcgcctcactcatggagatcacggcgatctccgcacttgcaaaggttgcgttcaaaaaaatcaatacaatctgtaatacaatagctcctatcatttctctgtcctccataaatccagcggagtcaatatttccgctgatattctcatttttaaccgacggcaggcagcttatgccttgtgctgcttttacgctgttacttttgccttagtcacagctctacaatctgtgcacccagtgccccggtcaagaagcattaggaatacgcctggaaaaactgcccgcagcagccttcttcagccgtaaaactacaaaaaggcacagcctgcatccgtccccggacacagactacgcccttatttatatcataatgctacatggagtagtcaattttctattttcactgtcatcctcgggaccatcgtccatgtactaaatcacatcctctcaataatatggctaataaaatatcatattttcccaaaaaagtcaatggtgtcctgcactgcgatctgaggcttatggtgtcctgcactgtgatctgaggctgtaggtatcctgcactgtcctgtgggactgccccaccattgggcccccgccttcgtttcacacagactttgtcttaatttttcctgtagaaatccctttttatttgctgtatactgaagctgcagtctaattcacaccacaaccaaaacgaacagaaatggagggttctcatgtatcaagccaatgaaagaagatacgaaaccatgacatacaaccgctgcggaaaaagcggtctgaagctcccggcagtgtcactgggtctttggcacaactttggagataccgcagcctacagcaatatgaaaagcctgtgctttacagcctttgacaacggcatcacccactttgacctggccaacaactatggccccctgccaggaagcgcggagaccaactttggaaagctgttcaaagaaaattttgtaccctaccgggatgagctgctcatcagcaccaaagccggttacgatatgtggaaaggcccctatggtgactgggggagcagaaaataccttctggccagcctggaccagagcctgaagcgcatgggcctggactatgtggatattttctaccatcaccgcatggatcctgaaacgcccctggaggagaccatgggtgccctccatcaggccgtgatcagcggaaaagccttatatgtaggcctttccaactacgacgggcccactctggagaaagcctgtagaattttgcaggagctgaactgcccctttatcatcaaccaaaattcttacaatatcttcaatagaaccattgaacacaatgggctgaagtccatggcacaaaagctggaaaaaggcattatctccttcagcccccttgcccagggacttctcactgaccggtacctgcatggcattcccaaggacagccgggtatacacggatggaagatttttgaaaaaagatcaaatcacagaagctaaactcaaccagatccgagggttgaaccagattgccgctgccagaggggaaagtctggccaccatggctcttcgatggatcttcaaggattctgcagtgacaagcgtgctcattggcgcctccaggccagaacagatcctggagaatctgaaggttctgaacagtcccgctttcaccccagaggagctggaacaaatcgatgagctatcattataattggttacagcttattttcttccaccttctgcatcttgtcctgggacagccggaagattttcacctctgcctcatgcccctttaacagctccttgtccagatctgccagggctgccgccttgctttttccatcccggatgtcaaactcctgcgtgtctaccacaaggcagccctcctcccaggttgtccccgcctccggagacacgcggatccggacagttacagacagcaggccctgttccatgcttcttctctgcatccgggccttttccagcacctcttcctggaatggatagttccggcacaaatcggccagttggataaggggcatggtccctcgataataatagtcgttttcctgcacaccgttattcaataccagtttcatgtaaaatcgccctcctctgctgtttttctgtctgaaattataccatattccagcgatatagtaaatgcaatttctcagagtgcttcctgtccttccgttgcagctgccagttgtggctggtcccagaaaaccttcctctttggttccatcctcccttaccaaagctatctatggagcggttccactgtcttccacagacggaatacctgctccgctgtatccgccacattgttgtatgcgttgtttttttccatagcctcttccagggtcagcaccccccgcaccactggaaaaaaagcgtcaatgccttcttcattgcatttttttgcatctctggtgaccgctcctgcaaaggcgatcactggcctgccatactttttcgccagccctgccactccaatgggcgcttttcccatggcagtctggccgtccagccgtccctctcctgtgatgaccaggtcagcctccttcacatagtcttccagccttgtctcttccagcactattttaatccctgattccaaaaccgcatttgtaaaagttagaaaggcaaagcccagtcctccagccgctcctgtgccgggacaggtctcgtctgccctgggatatttttctttggcaagacgggcatagtctcccagccatttgtccatgcgggtgatcatctcctggtcagcacccttctggggcccaaagaccgcgctgcagccctctgggccgcacaggggattggtcacatcacaggcaatgcggaattcacattcctttaacaggggatgcaccttctcctccctgatcgccgccagactggcaagcccccgggctcccggctccacctgtcttccctcacggtccagaaattcataccccagggcctggagcatccccacacccccgtcattggtagcacttcctccgatcccaatgagaaaccgcctgcatccatagtccatggcatctgcgatcaactcacccacaccataggtggtggtgtacagaggattcctgtcctttggcgaaactaaggtaatccctgctgccgctgacatctcgatcactgctgtggcggtctccggaatgatcccataggttccttccaccgtttcccccaaaggacctgtcaccaaacaggttcgggtgatccccttcatccctgctgccaaagcgtcaaccgtaccttcaccgccatccgccaaaggccttacctgcacctgagcgtccctgtacacccgccggattccctctgccacagccaatcctgcctccatggatgtgagactgcctttaaaagaatcaattgctgttaccaccttcattttaatccctcctgtttcaagcaggcatcttcttatccccacctgcatttcttagtacctttttcattacttttctactcaaattcagggcctgtcttttctcggtcctggactgcataggattggtttctgcggtccactgttttttttactatatcaaatttacccttcctataaaatgttatatatactataattataagatatttaaatatttttttggtatttgtaccatattttcaaagtaaccaggcggacactcgcttccatgcgtggaactataaacagcacaccacagaaccgctgataccctttggttttcagcggatacgtacatccccccaacttttttaaaggaggctctcatgaatatcaatattggcaaagaactgccccatcagattgtaaacaccgtaaaagacgtatgcggccataatattaattttatcgatccctcgggaatcattctggccagtaccgatgacagaaggatcggcagctttcacgagatcggccaaaaggccgcggcaacccagacagtcattgaggtagattctgaaaatctttacactggaacacactgcggggtgaacctgcccattttctataatcacacgctcatagctgtgatcggcatcagcggaccacccgatgaggtgcgaaaatatgcctacctggcagagcggatcactctgctgctcatccgggaaaaagagctgaatgccttcagccgcacccaggaggaaaagaaaaattacattctccatgccctgatcacccaggaagccctggatccccaatacctggatgaagccctcaaggaatggaacatcaaaaaaagcagcgctaagcgtcttctcatcatccgtcccaaagcctcccgggaaagcaaaagtctctttgtgatcgagagggaaatccagcagctgtaccaaaatatagatatccgcctctatgcccgcagctaccccaacgaatatctgtctgtggcggatgacccggtcttctcctccaaagccagactgatccaggaatttgcagacgcccgccaggatctgctggaaatagcagtgggaaagcccgtgtccatcgcaaaattgaaggactccttcctctctgcccagattgctctgaaaagcctgaaatccacccggcacaattatgccttatttgactcccttacccttgagatcatcctctctgccctggacagcagccggaaagaggaatatctaaggaaggttgtctcctcacttgatgaacaggatctggatctgttgaatatctattttgaggaagatgcttctttgaccaatacctgccgcaggctttttatccataaaaacactctccaatataggctggatgccattcaccagaaatgtggctataaccccagaaaattccgtgagggcgtccttttatatctggctgtaaagcttttataagagctctgtccgcccacggttcttcccccacaccatcctatagccgtcctgttcccggaaggatttcacaaaaaaccggattcctacatatataataataaaaaacgaaatgaggattatatgaatttttgtagaatctgtgggcgcttttgtcaatgctgccccaactgtaattgttgtccatcctgctgcagcaggcactgctgcggcagccatccttctgccacaggctccttcaccggccttaaaataaattccgtcacaggcagtcctgtcaccggtgcggtctatacgcttacacaaaatgggcaggaggcagcttccgctgtctctgatgaacagggacatctctccttcagcggcctggttcccggagaatatttattgtgggaaagtacgatacccgacggctatgcaggcgataacagctcctactgtgtgaatgtggacgatcagggaaatgtgaccatcaacgggcagcctgcccagaactttaccttcctgaacacccctgcggtgagaggcgccctcaccttttccaaaatcgatggaaataccaaccttggtctggagggcgctctttttactttgtcaaacggggcaactgcccagtctaatgaaaacggcaccgtagactttggccaggtcactccaggcacctacaccatggccgaaaccacgcccccggccggttatatccccaatccggcagtgtaccacatacagatagacccagagggccaggtgactgtggatggcacacccctctcccagttcaccgtacccaattaccgcccggtggtagaagagcctataattctccaggcctgaaataccatctagagaacaaataaagccttctccccggtttcttctttaactggggaagaaggctttaaaatagttctagttttccttaggcttttttctctggctgaggatctctttgttttcataggcgatctcaccattaatgatggtgtacagggtatgggtaaatacctccataggatttcctgtgaaaactgcaatgtctgcatcctttccctgctccaggcttcccacccggtcctccaccccgcagatttgggctggatgtagagtgatcgccttcaggccttcctccatgggcagtccgtatttgacagccagccctgcacacatgggcagatactggatcaaggctaccgggtgatccgtggtcactgccacctttacaccggccctggccagcacgcccgctgttttaaaggtcatatattccacttcaatttttgaccgggctgtcagatctgtgcctacaattgcgggaaaacctgactgggcaatggtatctgcgataaaatggccctctgtacaatggtctatggtaatgtccacatgaaattcttgagcgatacggatggctgtgagaatatcgtctgcccggtgggcatgggctttcatgggaatctcccttctcagcacagggatccaaggttccaggtcaaagtctggttcactgagtgttcctgcctcccgctgtttcaaatattgtacagccttaaacagttcttttctcagcatatacgctgtacccattcttgtggaaggacacagattctggtccccataggtggtcttaggattttcgccaaaggctaccttcatggcagcaggattttttaccaccatgtcatccacgcatctgccctgggtcttcataaagacaaactggccgcccaccacgttggcgcttcccggcccggccatgaccgatgtgatcccggcctggatggcatcgtgaaaagccggatccatagggtttactgcatctatagcccgaagccctgctgtcaccggctgcgtctgctcgttgcagtcatccccgatcagtccgctcttttcctctgtgatcccaatatgggcatgtgcctcgatcaggcccggcagaacccaggctccatccacatccagtatctcctcttctgcataccttttataatcctcatcctttaactgggacatctctcccacagacacgatcacttgacccttggtcttcacatatccctgttggatcacaggccccttcattgtataaattcttccattgattatcagcatgacaaaccgccctttctaagtaaaatactttcagaaaccttgtctgttagtattgacaaaaagcatttctgtcatacatctcatggatatactctcttcaatttgttgtttttccattggttttaaatttatctggttcacattcacagcttcttcagtgcatgctccctcatcatatctgccagggtattttccatgggccttgaactgtaccccagctctctctttgccttctcacagctgaaccttccgttgcttcgcagggtgtaaagagagtaagtggtaaacagcggtctttctccccgcatccgggcgatcagtcccaaaacagggactccggcataggccatccacaggggcagcacaggaatcctgccctttttcctggatcccttggccatacggaaaatctgggatatttcgtaatatcccccagagagtatgtagcattctcccttctttcccttttgcccagccagcacacagccctttgccacatcccgcacatctacaaaatcatatccgcccttaatgcaggccggaagctttccgtccacaaaatcccacaccatctgtaccaaatggttgctgcccttatcccctggtcctaaaatccctgaaggatgtacgatcacagcatccaacccctgctggacagcctccagcacaaggcgggtggccgaagccttagttttggcataaccgcccaccactctgtccggggaaaacttgctcacctcgctgaggatcccctttctctcctggatcgcatggacagagctcacatacaccatacgctttacctgatactccctgcacaattcaaccacattgcgggttccttctatatttacttcctccatggattccgtgagcctgcctgtaatgtccacaatacccgctgtgtggaacagaatcgtctcatattccccctcctcctgaaaaagacagcgcagactttccttgtcccttacatctcccttaaaatacttcacatggctttctgtcccttttttatctggaaggatcaatgcatggaccactccatcctcctttttcaaaagacgcaggatcgtagagcctaaatgtccgtcagctccagttacaatataaagccgtttcatctctcatgcccccttcggcagcaccctctgccagcagcaggaaaagctctttgattgtattaaactactcttttaatcggaatcttcccatcaattctttcagcagcatggcctgggcggatagctcctcactggctgccgcactttcttgggctgtggctgaatttacctgaaccaccccagatatctgttcaatgctctctttgatctgtgccgctgactgggcctgttcctccgagaatacagagatcccgtcaatcactgcggctacagctctcacaccttccataacctttttcatggagctggccgtttcatcggaaatcacggctccattttccaccgcctttaaagaattttcaatgagaacagctgtattcttagacgcctcctggcttttggccgccagagtcctcacatcaccggccaccacggcaaatcctctgccatgctctcctgctctggctgcttccacggaggcatttaatgccaggatatttgtctggaatgcaatttcctggatatccttcacaattttcttaatttcataagaggtgttccggatctcctgcatggctgtctgcattctctccatacgctggttgctctccactgcctcacgtcccaccacatagatcctgtcattggcatccgcagcattttctgcattggcagcaatcttttgggaaatttcgccgatgtttatggccagctcctccacagagcctgcctggtcagtggctccttgggaaagggcctgggcacccgtagacacctgctcggagccaaaggaaacctgttctgccgataaagtgatctgccccagggtattatttaaagattcaatgatgtgttccaaggcctgtccgataaaccggaaatctccaatataatttccctccacggcaatattgacatttccctgggagatttcccccaatatatgagaaatatcacgaatcatcgccttgagagctgtcacagaggaacggacactttctgccagacgtccgatttcatcctccccttttacctgtatttccacttccagatttcctctggagaattcctccatgttctcgctgatctctgtaagaggcctcataaaacgatgtatcataagagacagtaccaaaattaagacacccaggatcactaaggacaatgcgatcagaacaacgatcaaatcgtttcttgttgtatttacttcggatgtgggcagagaggccaccgccagccatccggttgtctcactatttctgaacactgccgtgtaggctgtccccccgtaggtaaaatctgtaagtccattgtaactgctttgaaccttgtttttatagtcctgggaaatctccagctctgttacgtttttgcccatggccgccggatcctcgctgtaaatatacaccgcatcctcgctgagcagttctatgtatcctttttcgcccaccttgatctgggacaggagctgggacagactgctcataagcacatcaaagcctacaaatccagtgatctcctctgaagcatctgagaataccggtgccgctatggagatgaccgcttctcctgtccccggatctatatagggcttggaaacctgagcctcccttccagaagatactgtggcataccaaggagtatttttcaaatctgccgggaccacctcccccgttgacataaggtaacagtcggttctggaatctgccgcccatacctgcatcacctgttcttcgctgagacgttttaaagctccgtccagttcccgcaggactgcatccttgtttctgtacgtattgatctcctccggcacagatactgtctgaaaatatttctggaaatccggattttcctggaacatgctcaccgccgcaagctttccgctgaaaaagtcatccacgatcgataccgcataatctgtctgcgcgtggagaagctgatcattgagccgtgaaatgctcctggctgttattaagcaggagatcacgatcaacagcagcaaggagggaatcagcacccccagaagataacggctgattttcctggatacagactgtttacgtcctcttttctttgtttttcgctctacctttgttctcatcccattcttttgcatcttcccacccatgtactggaaacctggacttaaatgatgtgcagtctctgccacgatttattctccatgaattttccagttttttattatgaccatattataccatataactcctaaaaggcaaagacaccaagggcatttcccggtatttcatttcgtttgtacagactcctctgggcaggctgcgtgttttcccagggaggacacgagtatcatcacttcatgggcccaaaggggggctgccgccaaaaatacaagctgtatccattccctgagggtcaaggccgctgttccaaatacgcggatgagatacgggatttccgtgacagcaatctgaagaaaaaagccggccacaaatgcagcaatcattgttttattggaaaaatgcttcatggcaaataccgatctctccctgtcccgcatgccaacagcgtggaaaacctgagagagacataaaaccgtaaatgcataggtctgtgcccggttcagaagctctggattttttaaaacttcccctatatttgccagattaaaggccagaccgttgtgtataagaaagtcatggggaattttaataaaagcggtgagacttacagccgcgatcaatatcccataaaaaaccgtacaggtaagccctccgtctgcaaacaggctttccttttctcccctgggaggctttttcatcagcctttctgtgtcattttcatccacccccagggccagggccggcagggaatctgtgatcagattgatccaaaggatatggctggccttcaagggcgatgccaagccgcagatgatggccaaaaacattgttaaaatctccccgaaattggaggaaaggagaaacagaaccgatttcttaatattctcataaatgccccttccctcctcaatggcccgttcaatggtggcaaaattgtcatctgtcaaaataagatctgccgcattttttgccacgtcggtgcctgtcattcccatggcgattccaatatctgctgtcttcagagaaggggcatcgttcactccgtccccggtcatggccactattttcccactttttttataggccttcacaatgcgcaccttatgctccggggagactcttgcaaacacatggactcccttgatcttctcccgcagctcctggtctgacagtccatcaatctgagcgcctgtcatgcattcctcctgcttctgtgcgatccccagctctctggcaatagccagggcggtatccagatggtcgcccgtgatcataaccgttgtcactccggcctggcggaaccggctcacagcctgtgccgcctccggtctggccggatccatcattcccaccatgcccacaaaggtcatcccagcctcctttggagagggatcgccgttccgcctggccagggcaagcacacgaagggcctgagaggacatgccctcacaggcctgccggattttttctctgtggagctgtgtaatcggcagaacctgatggtctataaggatggtatcacaacgttttacaatttcatctgccgcaccctttgtataggaaacataaccttgactgccctgatggaccgtggtcatcattttccgtgtggagtcaaaggccttctccctgatcctggggagacgctgcttcagcccttttagggccaccccattggctatggcccagtctaaaagtgccgtttcagtagggtcccccagcctgtttgttccttccgccacaccatcgttgcacagagccatcccttctaaaagctccctgcactcatgaggggccggtttcccggcgggataacatttctggttcacaaaacactgttccacagacatccggttctgggtgagggttccagtcttatctgaacatacaatgctcacagaacccagagtctccacgctgggaagtctgcgcacaatggtattcacccgcaccattttcgacacactcagagcaagaacaatggtcacaatggcgggcagtccctcgggaactgcagccactgccagagatatggctgtaatgaacatttctataatattcctgtgctgaaccactgccacaagaaaaagtgccccacacaggatcacggataatagactcagcagttttcccagatccgccagccgtttttgtaaaggcgtcatttcctggggagcatcgctgatcatagaggcaattttcccgatctctgtgtccattcccacagcagtcaccagcccgctcattcttcctgacgtggccatggttgacataaaggccatattccttcggtcccccaagggactattgcttcctgcaagataggccgcattttttcccacaggcatggattctccagtgagggccgactcctcagccttggcatttacggtctccaccaaacgcaaatctgccggcacctgtctgccggcatccaaatataccaaatctcccacaaccagctctgctgccggtatttccctttgttctccgtccctctttacaactgcccggggactggtgagctgcttgagcgcctccaaagccctgcgggctttcccctcctggacgatccccacaatggcattgagaaataccaccacaaggatgatcacggcatcgcttacttcgtgaagaagcagggatatggccgctgctgccaacagcacatagatcagcggatcattgagctgttggaaaaaactttctagaaaagacttctgtttttcctggtccagctcatttctgcccttctccttcagccgcctggccgcctcaacactggttaagccctgtatagcatcactatccagggctttttctgtttcttttatggatttttgttcaaacacggcttcaccccactgcatttttttacagcgtttttttcataaggacacgctgcctattacatgctatgcgtgtatggtttgatatatgactgccgggccttctgccagataccttatttttgatctcatcaggaggttctgcctgttattttttgcagctgtggcatggtttttccggtccctatgtcagaattccgtcaaacataaaggtgtgatggtctaaatacttccaattctccaccttgaatccatttttctcaaaaagagaaataatatcctttttatgccataattgttcatcacctgaatcactgtactttataaaccagttcatcagaaacacaagccctcgaaaaggagttgtcggatcccccaggatcacagttccacctggttttaatacccttttcatctcctccactgctttttgagggtggacgtaatgatgaaaggatgcattgcagatgatcagatcaaaaaacttctcctggtagggcagctgttccacatctcccacctccagagagacttcgccgcccagccgcctgcgtgccacaggtttgattccttctatatttctatttatttgtgattcctatcacagataaagggagtgggataggatataatcggttcaacataagatcaaatggcttgatgaagttcaagcatactggattggatcatccggtttattcttgatctgcacaaagagaactggccaatctctcggtgaatgatggaataatccggtgtgaaaataagaatttaaaataaaaaaggaagaaggcgattttctatgaaaaaactattatcaatggtaatcaccgcgggaatggttggaactatgctttccccacttactgtatcagcagcatcactggatgactacaaaattgcaaccaacgcagaatccaataaagttatcttcgacacagatatggggtatttcggagatgacacctatgctcttttcatgctgcttcaggcagatgccgcaggctggatcgacttacttggcgttacttctgtaggcggcaacgtaacaatcgctgaaggtaccactgccatcctcaatcagcttgaggcagccgggcgggacgacattccagtttatatgggcacagatatccccatcatgggacttcacgatgatgcaaccatcgaggcaaacggattgaaacgtattaagagtatggaaaaggtactcacctatggtgacaccatttcctatgacaatctgggagatctggaaaatgaggattggggatacagcaccctgaagccacaggaagagaaagcctgggaattcatgatcgatcaggtaaatgccaatcctggcaaagttaccatcattgccgtgggcgcatgtaccaacgtagccacagctatccagactgacccaggatttgcagaaaagacagccggcatttattacatgggcggtgccattgacgttcctggaaacgatactccttgtgcagaacgtaactggtattatgatccagaatccgtagaaatatgtctgacagccggattcccgaaacaggtggttgttcctcatgatatttcctacaaccaggttctcacaaaagaccttgtagagcatatcaacgaagctggagatactgttttcaacaagctgatcgaagaacatgcgtatccaaaatttgttgaggagccagaccgccgtcagaaactgtgggatgcacaggttcccggaatcttcctttgcccggatctgatctctaagacagatgtacgtgacatcgctatggaaacaaacatgggatacacctacggtgaatccgttgcctgggcagaaggaactggtcctgcaaaatccgctacctgtactgttgtttacgatgtagacggagaggcatattgggatttcgtagctgcactgtacagcacagagttcaaataaagatcttttaggatttcccttccttagacgaaaaccattgaatccgggaattttcttataagattcttaaaatgccggcacagttggttctctgaatcacgttcagagaacctctgctgccggcattttttccattaattcattctcaaaaacatctttttttcctgacagtgaaaaggatagcttaagtatctgaccggatggcccaccgcatttttgtggaacgggctcggctgttgcgggtgcactcctccagggaaggccgtatgacctcattggaaatctcactgtaaaggccagccttgtggaaattcttaaaggatttcttcaccagacggtcctctcctgaatgaaatgtcaatatggctgcccggccgccgggtgccagcacatccggaagcttttccagaaaagtgtacagtgcctcgtactcattgttcacatcaatccgcagcgcctggaaggtgcgctggcttgattttttaatggcctccttctggtcctgcttcggaaggaaggacaaggcatctgcgatcacctcataaagcttggtggtggtagcgatctcctccccttttctcagccttcccgtcacctcccgggcgatctccagtgcataaggctcatccgcattttccataagcattcccgcaaactcttctctcgtaatctccttcagacgctgggctgcgcttatgccctgccggggattcatcctcaggtccagcggcccttcggctttataagtaaaacctcgttccgggttatcaatctgcatggaagaaacgcccagatctgccagcaaaaaattaaattttcccacctccgccgctacctgatccacttctgcaaaattttgcagccggatggtcaaaatctcaggcccataccccagattttcaagacgcacctttgtcttggctgactcaatggggtccacgtccagggcatacaggtgtccctgagagttgagacattttaacatttccagtgtatggcctccatatcccaaggtggcatctaatccggtctgtcccggctgaatctgcaaaaactcaaggatttccctgacacagatagagatatgcattccggctggtgtgctgcccttctggatgaccttttctatggtatcggaatatttctctggatgaagctccttatacttttcctgataacgccttggatgcgtgccggaataacgcacacggcgtttgtgctgtttctcttgattttccatcttgttcctcctggtatgatttaaagtatatcataaaatcccatttgcagacagacctttattttctcagtctgtggcataatactcctgcaggatgttatatgcgatctcttttgcctgacttgtgctcactttctcagcagtctcatcctttaaatatacggcaaagtatatgttcccttcttcttcctgggaaaaacctataaaccaggcatttccatttgttccggttcccgtctttccatatattttttgaggggtatctgtgtccgtgagcatgacactttttagaatctccacttcctcctgtgtaaatatggaatctccctctatgatgttcttgagaacctccacctgttccagaggggagattttaagggacgactccagccagaaaccatttaactgggggagtggattggtattgctcccatcccattgtgatacatcacaattcccgtactccaacgccatcagctccttttgtacttcttccgttcctacctgatctatgactttcctgaagtaccaaatacaggagctttggaaggcttccttcaaatttaaatccgcattccattcttccactggataatcagcaccatcataccccattttgctctcctgggacgtaagcacctggttgtgaaggcccatcagtgtagatatcaccttgaaggtggaacatggggatacctgtgtattacattggtcctggttatacaaggtatacttctttgcagagctgtcataaaatactgcacatccctcaatggattggaaacagtcggaataatctgccaggaactgatttgaagtgttttggccggaatccagtggggtaccggcatgaatttcatccagaccccatcccccgatacctccccataagagaattgctgttaaactgaatgcagtatattttataaatttcattcttgaccctctcctctatatacccttggcacttgttatatttatgcttctgtcctaattatttcagattattttattacattttttctatggttctttctgtgttgattaaatattacatatgtaggattaataagtcaagtgattcttatcggatttcaacactttttctttattgaataaaggggacatgacacttctcctccccactccctcactcatgaggggcttggcatgcataaaagcctggaatttttaaaaagtccaggcttttgtgcgtaccctctatacatatttctcatggattacttttctatgattatcgctctagaattatggcttaagaattacttttatacagttatcctcttttttatcaaaaatactataagcatggcttccttcttctaaggaaagcgtatgggtgatgatgtctgtggcatcaaattcacctttttgaattttctccagcatcaagtcaacgtatctggttgcagggcattgtcccatttttagagtaatattcttggaaaagaaatttccaaggggaaaattgttatatttattcccatatacaccaaccaaggctactgtgccagtctttctgatacactgagaagctgtctctatggctgatttggaccctccctgcaatttcaatgccgtttcaattttttctacaaccgaggatttcccatccagtcctacacaatcaatgaccgaatgggctcctccatgtgtaatttcctttatgtgttctcctatttgttcatattcctcaaaatttaaggcttccacaccataacctcttgcatgttccaaacgatagcccacacggtctacggcaagaatcctgcctgctcctttttgaatgcaccacttgatggtcattaatccaatgggcccgcagcctaatacaactaccgtatcacctgctttcacgtttgcgatttccgtgccccaataggatgtgggcagaacgtctgttacgaataaaacctgctcatctgttaattcctctggtacttttttcggccctacattggcatacggaacccggatatattcggcttgtcctccggcataatttccatggtatttactataacccaagagtccgccggatccggcgtagtcattggaattatcacattgactgtattctcctctgttacaaaattcgcaatggccacatgccacgggaaacggaatgacaactctgtcacctttctttagatttttaacttcctttcctgtctcttccacaattcccatggtttcatgacctaaaacatatccatcatacatgccctttaccaaaccatggactaaatgtaaatccgatccgcatatagccgtggatgtgacttttactataatatcatcttctttttcgattctgggatcttccacggtcctgcattgaaccttctgcagcccatcgtacacgatagctttcattgtaatacctcctaggattctttagaggtattatttgtagatgaggaaaatctatgctagagatttcccactgttactgcatcttcaatggacagatagtggtgtgcacttccatccgccaaaagtcgattccagctgcctttaataccagtcatgcttctcatttctttccagcgatgcaatctgatccatttcctcttctgtcagttcaaaatcaaaaatgcttatattttcagctatatgttccggattgcttgagcctggaattgcaatgactcctcgctgtacattccatctaagaattacctggactggggtttttccgtgacgatctgatatctcctctaatacaggatctgtcaataattctttctgatgacctcttcccccaaggggataccagccttctgccacaatgccttttgattggatatagggcacaacctcctgttcctgataatatggatggatctcgttttgaaccagtgcaggaactgtgtcaacctgtggtagaaattcttctaattcttctatataccaattggataatccaaccgagcggatttttccgtctgttatatacttttcaatcgctttgtacgcattcacatctccctctcctgggtgatgtaataacatcaaatcaatatagcccatatctagtttttctagagcctgctctatggcagcttccggatcatcaaactgagttggatacagctttgttgtgatgaacatttcttcccttgttacaagtccgtcatttatggcttttctaactgcctctcccacagcttcttcattatgatacatataggctgtgtcaatcagtctatatcccttttggatagcagtgtatacagaatctacacatatgtcatcttcaagagcataggtaccaagaccaagtacaggcatatcataaccactgtttaaggtcaccacaggtgcaaggcttacttttctttcacttgcaagttctatcacaaccgtagtctcttcaccactaaggatttcctccaacgacccccggtcctcctcaaccacctttccaagcctggtatatgcccaggtgttaggatgatagaaaatagctatttgatcgctgttatagagcataagatctccagtctctgtggtgatctgtgcatcatcactggccagagtggtgccaagctcgcagaccttctcaaagccgccatgatttgacgcagacatggtaattggacctttctgtaaaagttctgccaattcttttgccgaatcattgtctgcaagctctgccatgatcacattgctgccgattgtcaattgaatcgtattcaccatgcttatctctgcctcccgatctgtactgtcatgctccaaagtctgtgcagctgaaactattttaacaaaaccagtaataccaagcagcagaacaaacacaagacttatcatcgtcaaacatgtattttttgtttttttcattccatcaatcctttttccttataccaagtaggtgcgaaagaactgatccagcttgtcaaaaggaatcgcatccttcccgcctccatcatacagatccgtatgcacggcatccggaatgatgagcagctccttgttgtctgcccaaggattctccttgatcatgtccctataggcatctttactaaagtaacaggaatgtgctttctccccatgtatcacaagaactgcactacggatttcattgctgtattgcagaatcggctgatttaaaaatgataaacatcctgtcacattccatccaccatttgaattgccggaacggatatggtaaccacgttctgtcttataatagtcgtggtaatcctttacgaaaaatggagcatcttgtggcaaaggatccaccacaccgccgccaagtgcgtaactgccattcttataatcaaccaggcgctgtgcattcattgcctgcttctttgcataacgggcatctgcagaatcctcggaatcgaagtaaccgtttgcatttacacgtgccatatcatacatggtcaatgctgctgttgctttaatacgagtatccagcgctgctgcgttgagtgccatgccgccccagccacagattccgataataccaattctctccggatccacattatcctgaacagataaaaaatcaacagatgcctgaaaatcttctgtattaatatccggtgatgccatatatcttggctgtcccccgctttcaccagtaaacgacggatcaaaagcaattgttaaatacccccgctctgccattgtctgtgcataaagacccgctgcctgctccttaaccgctccaaaaggtccacacacggcaatcgcgggaagctttccttctgcattttttggtatataccgatcagccgcaagagtgatcccataacgattatggaaggttaccttgctgtgatctactttctctgatttttcaaagatcttatcccattcctgtgtaagatttaatttttccattttaatttctctccttctgctttttttgagacaggataccctgccgggttataatttgtttttgtttatctggtaaacaagaagatccagatcatctacctttttttcgctttcgtgaagaccatccatcaatgttttccggtgtcttcgaagaagcagccgggccgtttccatgtctccggcgatcacctgctctgtgatggttttaatcagcccttcgtcacagtctattcctttcagtcttcttatcaaatgttcctttttattttccatcctatgacctaccgaaaactcctctcaataatgcctgctatatcttcctctgttatctcctaaggtgttttcttatcatctttatccgtcccccctttttccgttatgtttttgattgattttattttagcttctatttgtgatattcgctaatactatttttgaatattatgatatacatttttcgtatttcattgtataatgtttcttggaaaaaaggaggcttgtgaaatggaacttaagacattacagaattttttaacaatcgcaagagaagaaaatatgacaaaggctgcggatattcttcatatcacacagcctactctttccagacagatcaaagctcttgaagatgaactaggacaaaagctcttcatccgccatagttttaatattgagcttacagatgccggcagccttctgcgcaaacaggctgaggatcttctttccatggcaaataaaataacagaaagctttcactccctggatgatatcactggaggcaacatctatttaggtcttgcggaaagctatcagattggttttcttgctgattttataaaggattttaaagtaagatatccgaatctaaaatatcacatcaccagcggggatactgaacaagtatctgagaaacttgaaaaggggatcttagatctggctgccattgtggaggagcctgattttaacaaatacaatgccatttcgtttccggaatctgacaaatgggtagcggtagtcccagtctccgatgaccttgcacagaaaacttttatcacaccacatgacttgatcggaaaacccttattctgttccgaacaatcctggaagaaagatattcccggctgggcaggaaatgtttttccagaactgcatttagaaggaagcttccggctttcctataacgcctccttgtttgccaaaagaggactgggctgtcttctaaccttcgacaagctaatagataccagcgaaaacagtggccttaaggcaatcccgctttatccggcattaacaacacccatgtatctcatctggaaaaagcagcagattttttctccaattgcagaacgttttatatccgagtttcactctcgaaccgctatcaaaatattcccacaatagcttccatgagaatctgtcctacggtaactgcgtcttcaatggacagatagtggtctgcacttgcatccaccaaaagcttcccggaagccggaaattcttcgtcagcaaaccataatttaaaaagaaggggataataaggcaggaaatcaaagagtatggtcaaatcggcattactttctacctgcctgcccccaagtctcccgcacttatccagaagctctttctcagaaatctgttgaaaacggcggcggatcacattctcacaccgcctgtcaaaatctcctccccgaatcagcccatccttcaattcacccattgggatccatcgctctgccagcggcattccatctgccagcttcatgtaatgcaggataataagctactgccattcatttatgtatggtgtgatctcatagttgggataggaaatacagatatcggttcccatacttttcagggaaaactgtgaagctttttcagtataaacaattcctgtattttctgcaattgtctgcggctccttatctgaaagccattttctggccactttcatcatttcctcaaaagcccggttttcctttgtatgtgtgtagtcagccatctccccttattttcctccaatcagcttgtctgccgtaaagttcctgttcaaagccgcaacataaagcctagctaagacaattgcctgcgttcgtcttgttctcgttcttataatcccagtttatcaataattttccccaatgcttcacgcaccggagagtcatccggtaattgtaccgttggttttccatcacaatcaaaacgatacaccatttcatcatgagggacaattcccagtaattccaatctctgtttttctatttccaattttataccctcatccagttttccttccggcgcccggttaataaccaggccggctttctgtggcgtaaaatgcatttctttcataagctttgcgattcttccggctgcctgaacgccccgccgggaacagtcgctgaccaaaatggcagtctccatggagggaaccagccctctgctgatatgttccatccccgcctcattatccaccaccacataaggatagttgctctgcagcttttgaatctgcgtctgcaccagcccgtttacaaagcaatagcatccctgtccctggcttctccccataaccattaggtcaaaatcctcttcttccacaatggcatcctcaaggcgcatctccagatatgtctgtttcgtcatgcccgccggaatctgataattgctgtcacccccggcacgttcaattacctcccgaagttctcccatagttatttctacctccacaccgagaacctcatttaaattcgaattggcgtctgcatcaactgccagcaccggtttttttccgttttcacataaatattgaattaacagcccgcaaatggttgtttttcccacgccgccttttcctgctactgcaattacatgtcccatttttttactcctctacttttctgaacaacctgttgatttctttcctaaaacttattataattagtcatagaactttttcaataatcaataatttcattctgtaacgttcctgatcatattcaaaaatctgttgagaaaagagaagcctatgacacccaaaaaagaggaccgccgcacaaaatatacaaaacagataattaaagaaacctttctgcatatgctggaaaagaaaagctatcccaaatttaccgtaactgaattatgtaggttagccgaaattaaccgtggaacattttatctgcactatcttgatatagatgatgttttggacgatatcataacagaaatgctttctgacaccacggatgttatggaccatattttatgcccgcaaaagcagcagaccggatgtacctacccattctgtgacaaaattcacagtacttcccaataccgcagtctttttcttgatgataccatttcctccaggattattgaaaaaattgctgacatatataaagaaaactatgtcacacatctaatgtcgcatagtcttctaacttttcagcaggcggaggctgtattctattttcaaatgaatggctgccttacaattaacaaactaaccttacggaatcactgtgcccattggaaagatgtacaacataccattgatggctttatcaaggccggtctggaaagctttatgattcatgatcagcgtgatgagctgcggtgattgccaggcagcactgccaatctattttcattttagcagtttaatgagcagttcagcaatcgccgcaactgtaattcctatggctgcaccttagctccaaaaactaatttgtttatccttcaatgattttacctttctatctgtcaccttatcatctgaatgtaatattccacataacaacggtgaattctcatcgtataattctatacttttccttaccttttcattgctaaaattagcataacaatatttacacccatttttacatgtgttgtatgttccaacctcaatgctctcaaaacatccacattcccctctttgatttttatcttttccaacttctaatctgcagcctattattttttctatcaactttttatcaatgcagcttccatgcttaattccaatattagtcaagtctatttgctctgcacacgtttcaataactaattgatttctttcagcaatctttgctaactctttggccatgtcaaccatttgttccttagttatattttgaatatttaatccttttatatttctctgtgtctttgcgtataaatccacaaaactaatgatcactttttccacatgatcttgtaaacgatcggcaatttcttcaaatgctttaagatgatactccatactatatcgatcatttattagaatgggatcgtatcgccatattaccctatcttttcctattttttcggataattttttaaatgtaccaattagttcattctttttatcaggtagattcggttctatatcttttccatatcctgtaagagtaaactgataataatattgatattcatacagttcttcaaggcgatccagcatattcgctggattcttagtccagaatacaatacaatctaccacttctggtgataaatctattctgcttacctgatggatattcatgggatttcttacatataaaaatccttctttaatacgattgtaaaaccactctgaataataatttggtatatctgttcttctactaacacttaatatcataacgaacttctttctttattaatccttgtgcactttggcaatgcttaaacggcttatagaattctcttagcaaagacactgatacttctctcattgaaagatctttgatgggttaatacgctctatatccctctgtcggagataagtattgaaagtaccagatgtctaccacatcgagtattaaataacgggcaggaattttgcaggactggtttccctccccgcctccgcagcccggacaatgaccgtccaacttcatagggcatagtccacagtttaagccgcagagggaaatgcatagattgcctcttacaaaatccttcacggtatctccccccttcactcataatccaatcaccctctctgctacctgttccggtgaaagactggatatattaatcttgacggtatccagtttcttatacattggcaaccgtgccaaactccgtggaatcacatccgctgtgcgtattctcatatctacatccttctgcaaccgctttcttaaagcttcctcactgcatacaagtgatatcccatgaacctgacacctggaaatatccagtctggacaaaatatcatctatgatactttgctcatgcatcacccagcaaaatatgatattttcataggcagaacattgtataaaattattcagaagaaaggctatgtaatcatatataactttttcactgcctcaaccctcctacggcaagcaatgcacatggtgcaaacatgacaggctttattttttccggcattttcatattcctttactcctctgccaccaaagcaatgtcatcttttttcttcccaaaatccgttacatatatctgtaactcaggctgtttgatgattgttctcggcggaacgggtacacccttcggcacaaaaatagcttcatataaaaaattttcaagcagactgattctttttctaaaatttctctgataatgtagtccatggatacctccgcataagtttgttttaacagtacagcagactagactcgtcagcgatgtacaatataacggtaatgcggcatatccacacctctataatattttgtccatgtgtccgtcattgtcataccgtttcttatggctacattttgagatgcgacattggtatctctgataatagaacagacttcatccgcttttaatatttcaaacgcatactttttacaggcctttgctgcttcggtggcataccctttatgccagtataaccgttcaaaaagataaccgatctcaagcacttcctcatctttccactgctgcatcgtaagtccacattgaccaatcatttcatccgtctctttaagaatgactgcccataagccaaagttccatttttgataacggaaaatttgtcgatccaaccattcctgcacttcagtatcactaagcgctccttcataagcgtacattgtttcctcatcctgtaatatcttacataaagatttaaaatcagactgattcatctctcgtaaagacaacctctccgtttcaaatatcatcctatcatcacctcaaattcaaatgttcggttaagttcagtttactatattttagacatttccagcatactgatctcctccttttcctgcgaaacgaacattcggaatccgtttcacagcttcctcacccgtttcctcttgtaactcgaaatgttgcttcagtcataaatatcatcagaatgataaacccagcaagataaatcggaagaataccaaaaccaattatatttcccaaaattccatataaaggtggcataaaggtagatccgatatatgcacttgccatctgaattccaataattgcccccgaattctctgatccaaaattatccggcgtcgaatggataatgcagggataaatcggtgcgcatcctaagccaatcgtgataaatccaacaaatgcggctgctgtatgttccgtgggaatcagcaacaacatgataccacaggataagatagctgttcccaggataatcatttttctgtcgccaagatgattcgtaataaatccgcttataaacctgccgacggtaattcctacgaaaaacagagatgcaagtcttgccgcttgctccactgaaacacctctgacctctaccatataagtacttgcccatcccattgccgttgcttccgcagcacagtacgcaaaaaatcctgtcaaaagataaggaacaccacgaatcttcaaggctgcaatcaggccgatacttttaccgcttccgccttctgtattctgattgactttccataccggcagggttagtagcagaataataccgattgcaaattgaagaagcgcaatcatgcggtagccattatgccaagtagaatgcgtcagggcataactcataacaaatgggctgacaatcgtccccactccccaaaaacaatgcagccaactcatatgcttggaagaatagtggagagcaacataattattaagtgccgcatcaattgctcctgctcccagtccataaggaacagcaaacagaatcagcatccaaaactgattggagatggaaaacccaaacagggcaatcgctgtaaaaaacacactgatcaccgttaccatacgagtgccgaattttctggttaatttgtcagaaaaaagactggacacaatcgttccgcccgatatgaccattgatacaattcccataaaagagattggtacatttagttctgtatgcataacaggccagcccgaccctaaaagggaatcgggcaggccgaggcttataaatgccagataaataagtgatagtaataataaatacataactccaactattccttttccatatttattatattttcagaaatcagttttccgtgatcataataaatatcatcctccggaccaatttctcttaacacctttgctggctgtccaacagcaagaacatttgaaggaatatcttttgtcactaccgatccggctcctataacagaattatccccaatatgcacaccgggcaaaatcgtcacattagaagcgatccacacgttttttccaatataaactggtttgttgcagccatagccttccgctctcagcctaggcgaaatcggatgggatgctgcaacgattgtcacatttggtgcaatcattgttccgtcaccaatgtaaatattggcatcatccaccagtgtagcattatagttcagatagtgcacattttactatcttattaataattttctcaatccaatacactgtcctgtacagtttgtccaggattaatagtactcaattttaagaatagtatttttgctttttgctggatggtttatctggtatagtcatctttaattctcctgatcccagcatttcttccaaataatgcctcctaaaatagtttctattagaaaagccaaattcatccactatctcttttgctgttttaggttctttacaaaactctaaaatcatcctgtacacatcctgtacattatcctgaccattttgtacaggatcaatatcttttttgagaatgcgcatatatctgtcgctggctttacacaagaccataataccttcttcattaatatcatactctggtaagggctcatcatactgtgcacaggcttctttgattttgacaaaacctcttccccatgcttcaatcattccgcaaaggaaaaagacatgtgccaatttaggattaaacggcttcgatgaatgtttttcatataatttttctgtggaattcaaattggccggcatttccccatcattccatatatataccttatcttcatacacactaatttgaatcggattacagctactataatctttgtgcacaatggcgttcaaaagaatttctctaaatgcatctttatggatcatatactgctctactctttgcacgccatgataagtaatcagagccttcatatacttcgtatacaccaaatcaacagtcctgtccacctgctcgattaacggaccatgtatctcatcttgatactgcaaatcggaatcagattcaccaaaatatccgatttttatatatgaacctgttacccatttttccggatttttataaaatgccaacatcgccgctctaaccaggaaatcatcttcatcttttaaatacaagttctccatcagaatatcttccggcacattgacgtcgtcctctgtcagtcttccccttgcaacagctttatccttaaataactgtattgcttcaaatttcaaatcctgcgcagtgattctcggcaatgcaaccccatcccaggttttgccttgtgctttcaaaagttttttatccaattcctttccggtaattgtgcgcatagtgcttccagagcgataataatacttgccatggtaactgatcaaagatggatatttttctacaattatttcaatatattccaaggaaccttcaaaaagcagattaacatccgctacaattcccatggtgtctgtaatcttgcttggaatcacctccaatagtttttttgatttttgtatgcctacaactttcccgttatcatcttttcctatatataacgttcctccgtaagcattcgcatatccgcatatccattccaaatattcatcatgccacgattctttccattcaattgtttgatgttcaggcattatatacacctcctcccatatttctttagcatataattcatatttatacttctttaaaagactttttaatgcacagttccacaatgcacaatattataactattacccaaaattcattttatcaaacaaattgtaaaatcaagtctgaacccgctcaatttgattaaatgatcatttcatacaattagtttttttataaaacaattatttaaatccatatatttttctttaataaatccatctaacaattctttctgttccgcgttcaaacttgcattatctctaatccgcaaatgaatagcctttcctactgcataagataattgttcttattgcaaaatatttacattgtttcttgaaacatttggtataaactctggatttgaaatattgatctgttaggttaattgccctttgctgggtgcacaactggaatttgtcaaataatcaacagtcgttcaaaatgtattttacatatgattccttttcgttcaagtaaaataccaatatagagcaaatcgaatccaagaaatgctagattatggctaatctgagaaataccctatattaccaattctattttatcagtttcagatattcctgctctccaagaatatctcatagttgctacagaaatagttactactcacctaacatatcctcactttccggttttataatagcagtcagtttttcaatgaaattctgtgtatgcttagccgcaatattcttgcttttttctttatattcctgcattacagaattcaaatcatctcttaactttttgagtgatgccgttgcggcttgtctatcaatctctggggaattactatactgtccccaaattccaacaaaccaccctgaaaaataatttttatccatattatttgctttcttaaatgcattaattgttgcagattccatctcaagagtaaatgtattgtatctcttgttacttagctctgtgaactactcggcgattgaattaccgagcatctatatgccgcaccttcggtgctgccataacgggcagtccatgcgcccaatattgctagtcctttcggacttacacaaatactttctgcggacagttcagtccggccgcttccggaaacggaagtttatttttttgcagatacagacgcaggatattatatgcccccacgcagtctgcattatagatatccggctcatctatatataatccacgatattttcgattctgactttgtgcaaacgcttttcccactttatcacttttcggactgcactgactgctgtaattttctttctgacggatcatccttattccgtaccgtttcagcttatactccagtttctggaggatcttttcatacggaaaggaatgaagctgctgattgatccttccaagatcctttcccttacgtatccccttcatatctccaattacaaccgttgtgatatgctctgcctgacaatactcagccacatatctggttgttttatgaataagatcagtaactttatttttcttctttcgatatagggaacgtacctttttcgtttttttcgggtacttgatcccacagcatgactgctgacggtcactgatcccctgatatctggcaatctctttatcaaaataatgtgtaatattcaataatccgtttaacagaaatgtcttccctgcactgtcatagcaggccagcatatttttcagtcccatgtcgatccccagataatgtccattatcttcctgcatcggaacatctgtctcttcatatactgctattgctgtatatcttttttcatcaaacttgatctgaatctctttgatatgaatgtctgaaaaccgctttgttttcagataaagatgatcagcatccacaccctggctcttcagataagtttttaactgttttggaatggtcagccggatctttccttcttcctgccggattgcatctttcaaaaaagtaatatccatcttctcttttcggaaacgcggcggtctcggattctccacccctctgctcctcagcaatacaaaaaagcttttccacgcctcttccaattgttggagcacatcctgtgccgtctgtgatggaagatttttataaaagaaattttcttttaaccgtttcttctgatcataccagttcggatatctggtcattccaatctctttgtaattccttttttcataatttgccacattccagagtttaaatgctgcatatcccatatgtccgaaatgatcttctgttcttctgttggtaaaaatacttctcttctcgacaagagcatatgcattcccctttcctgtcagtaagacttcgtttgtttttcaatagatctgcggatgttttcctccgaaacgtttcctattgtttccacataataggaatgatcccacaattctcccttccataaatatttacggagttccggatatttttggagagtatatcttccaataatacccttcagcatctttacaatatatgagatcgggatcttaggtggtgcagaaacaaaacaatggatatggtctctttctccagcttcaaataaatggactgtgaagcccttctcatcagcgatctccacagcccattttttcatcgtctgctctatgtcttctgtgatgatcttcctgcgatactttaccggccacaccacatgatagttgatattatatacgcaggttcttgcatgtatcagattttctttcatgcatatagtatacactatttcaataagcaaagcaatgtgttgtcgaatgtctgttctttttttataggctggatacagccactattgtttcgtgcaaaaatgcacattttgacgctttcatctcggcaattgaataaccgaggattcccgcttgctatcctaaatcatatgacttttgccccaaaaataagggttttgccctgtggtatcatttttctgataaccatacggcaaaaccctctctgaatatttaccccccccccctcccctacctctgtggaaacttatccatcgaactttccgcaaaaacgcaactccattttcctcatataatcccgcaaaccggcatagaatcaagctttacgggttagcaacatgacggtttctactgtttcgcttccacaactaggatatataccacatgaaaatggtagtggtacacatcctcgctcaaggcttcggacattgcccggttatgctcgtcggcatttggcacagaaaaacgggaacagctttagttctgtatcgtccctgatttttactgacgtccgacctttacataccggacagcatatttaaaaatgaccttctattgacgtaacaggtaaaacgtggtatagtatgaatgaacacaagaaagtattcattcatatcgtaaaagtaaggaggtttaatcacattggaggataagaagcaagcattaaaaacagccgcctatgatgtcttttctaaaaagggatacaaggcaacaggaatttcagaaattgctaaacaagctggtatggcggttggttctttttacaattattatgacagtaaagaagcaattttcctagacgtttatgctgacgaaaacaatcgtgttcgtcaaattataatggaagatattgatttggaatgggatatggctaagctcatcaggcagatttttgaaagtgtacatagtctcgtttcgtccaataaaatactgacggaatggtataatccggttatttcggataagctgcacagctattattcttcggaaaaaggcacggcctcatatccatttcatcagttcttggtggaattgtttaccaatcgtatgttggcagaaggttattctcaagagaaaattcaagaggtgttgcaggtttgtcagcttttttactatatggacacacatatcactgaggaggatttccctaatgtcagtcaggcaaccgaagcattggcaacttattttgtaaaaggactttttaaataaataaagaatacatttctttattttttacagcaaagtgaatgaacaaattaaattgttcattcatattaaaataataaggaggaaaacatgaacaaattaaccattacaggattttctttttctgttataggaatcctggttcttatttggggagctgctttacagccaatcaatttattaagccctgattttatgtcctttgcgactggcggtttaattttactggctgcaggactttgtatgattagtggtcttccctcgatcctgtctcttgcaggaatttggttggccgcagtggctgctatgctctatatttacagtctgccgaatactgacttgattgtcaaggtgattggatttacccctgtcattgctttgtctgcttggctgtctataaaaatttggaaagcctaactattaatagtcaatctcccaaatgggaaatgctgtgaattggtgagtacgggaaaaagggaggttccacataaaccgtctggcggtatctaactgattaacaaatctgcaaagggctgtggtcggagtctttcaggaaatgtctgtgcggtaggacgaacgaaccaatccacagcatcccttgcagtgtagcatgggaccttggagagggctgcaaaaactactattatataatacaaggatgaatacaatgaatagaggtaaaaaaatgttaatgattattcttattgtaatggctgtgcttgctctcgtgatatggggaggtattactttccttggacgtggccagtctttatcagtcaagtccatcgaaaatcccaatggaaatctttatttagttcacttgacgaaacctgacaatacgacgtggaaagctggttcttttgctaaatttaaattaccagatgttaaagcgaaagagagcgaacaaaatagccattggttaaccatcgcttccaatcctgatgacaatgaaatcctcattctgactcataataacggcagcctatataaggaaactttgaccagcttaccagcaggtagcaaaattgagatgagttggctggactcgcatttgtcagttgcagacggacaggaaccgattgtttgctttgcatctgatgttggtatcgcagcgatacgtcctattgtcaacgagtggtttggtaaacgtccaattgttctcaaccatctagacaagggagtgactgtatttgataaggaaatggcagaattgtcaaatcaagaagacaactttacttatgaaaccagcgatatcctttcccagagccaagaaaacctgaagaaagcagcagataagtatggcaataaagccacctatctcttgtctggtcagtctgatgacgttgaggagatgaagaaatttcttgaagacaagggaattgacagcaatcagattaaaatggatagctttaaaggttcgaaatagtgacgatcattttaccttaagttttactaataacttaaagtaacttagacgatctatttaaaaatattataggtaattattgaatgcgataaactaaagaattcaccactttacaactttttcacaaaaaaatgccgtacagagcactttggtgtataataagtttgccaacaaaatatacgaaggaaagtgaccctgtacgacaaacttattatacaacgaaaagaacctgattggtagacttcatcaatatttttttatttattttgaaactttttctgcaccgaccgccgagactctgttcctgctggttttatccatcctggctatggaatccgctcattccatccggttcctttaccggcattttttatcaggcataacacaaaaatcccttaacgctttttactacgcctgttcctatgctaaagtggattattcccgcttcatgaatgtgaccgcatccatcgctttaaagctggtccctgactccttgaagctgcagcccgtgttcctgtgtattgacgacaccatggtctccaagttcggtaaaaaattcgaggatgtgtcgaagctttttgaccatgcagctcataacggctctaattacctgaatgggcactgctttgtcagccttatgctctgcatccctgtatggaagaacagcaggatcgtctaccttgctgtcccccttggctaccgtatgtggcagaaaaatgagaccaagctggagcttgctgcgtctatggtgcgtcagactatgcccaccttttcagggaagaggaatgtcatcctcctgtgtgacagctggtatgccaagaaaaatctcacatgcgttgtggatgaatatccggatctggacctcatctgtaatgcacggtatgactctgtcatttacgacctggcgccgcagcggaccggcaaaaggggccgtcctgccaagcatgggaaacgtctttcactgaaagaggatttctgtctgtccgacgaaaagattggggattattacacaggtgtacgccgtgtcctcacaaatatttttagtggaagggaagtccttgcctatgtcacatccacagagaaagagggcggttccagacgcctatttttcagtaccatttttccggagcagatgcagattttctgtgcatggcaggagaaggcacctttaaaccagacagggggcggctggatgaaatacatccccttgttctgttatggtttccgctggaacatagaaattagctactatgagcagaaaacattctggtcattatgcagctatatggtgcggagtcataaagggatcgaaatgctggtcaacctgatcaacatcacttacagcgccatgaagatactgccttatcaggatgaggcattttcaaaataccgtgaagaaagcgtgcaggaattccgtttttttctaagtgaacagatccggcagcaggtattttttgctactttcgtgcaaaataccgtaaccagcataaaatccaaaggtattataaaggctttgaaacagctggttcaggaacaatgctggcatttgtaaaacttgtaaagtggtgtaaagaattttaaaatagcataattaaagaacctgacgcaaagacacagagccgataatgtaagatataaatctcacgttgtcggctcttttgttaaaaggattatcatgaaaatatatactgcaagccaattttatgctgaacaggaatcttattttgcaagaggcaaggtcaggagaaatgtcgttccctgacctggggagctttcaccggtaagttggcctccatctttttccgcccttcacaataatcattactgattatcccgcaagactcgctactgttgcttggctagaccttaaacagacaggatttacacctgttgggttaattgccctttgctgggcgcacaactgggatttgtttcaagcattgaaatacatatcatagacaatatatccctttatatttttcaatgctccctcataagtttcttgacacatcatacagcgtggctctttcatcggtatcccacttgttgggtaaaggttaaactctgaggatgttttaaatccaagacgattataaaaatgataatcgccctcaactgtaatccctttatatcctgcatttctgacttttccaatgccttggctaatcattgcagagccaattccctgatgaaagtggtccgcatgaacggccacgggtgcaagcataacgatatttgtttcttccccgtcatcaatatgtactccctttggtgttgaagatagtggaaatctagaaaacaggaaatggcctactaatttgccatttaattcagcaacaaatgataattcgggaatataatattcagaatcacgtatttcttctactagagcaataatatctgttccatccgagtaatccgttccttcacgaaatgaacgtaaaatcagtgaaattatttctttataatctttatgtgtttcttgtcgtattattatatcatttctcaacattttgatctccttctataattattagtaattttcttctcacattttatatgtaaccgatcatgcatatccctctcgattccaatcttccagtccaacaactgatggtagtgctaatctatttatctattagcatttccaaagcatcttccatagtgacacattttgcttatcttttaggccacatcaatttattataatagttttaagctgcttcttttgaaaattactcattatcaaatgttgaatttgtatactctggtacagtcatatcaaagccatgttcaatcattgccatatgctcccttacaacctctacttttccaaccccaacaactggaatttatctacttgcttttacatgaatccgacaaaatttttcaaagcaagtgccatcaggctgtaatgtcttttctaacattgattttataacatcatctcgaaattcagttttcatttcttctgaaataatgctgataaaaggaactatgctcggttggtctatgcattttatcatctcgtcagcacttaagaaaaacctatccttatttacttccgtaatactgtatttggaaaaaccagaggcaacaacgatctttgcataatcatctttggtcggcattatctttggatttccttttaacacgataagcattctattttccaaagcatgattcaaagcatcatcttgaggctttgaatcatgctttggaatccggtactttggtgctttggagcgcagtgaatttcaccataatatctacgccgctgacaatgtattccggctcatccgcaccaaggtttttgcaggcatcaatgactttttgaatgccacgtccccagctttcaatgtatccggcacgataaaatactatcgcaatatccggattatagggctttaatgcgtgtaaacccaacagtctctctgctgtccagtcaaagggcagcatactgcaattgctgatgaacatagcatcgtcttggatttgtatctgcacaggtacgttgtccgcccagttgcaatggctggcaaacctatacttattataccacggaggttttttgatacttgaagctaaaactatttgggaactcacctgcatagcgggtggttttattggatttcaatccaagaagagcccggcaggtttccccaccaggcatttcatatctcgcagcctaagccctttttacgaagattcttttctccatatcgtgcaccagctcccatcccttactctgatgacattgtcctttggtttactggcattttccctctgttgatatcaatcttcccacttccgttatcccctaatctatatccatttcctttccacttcatttttcaattctttaaacatcccataatacctgtcttgcacagctttcacgatatccaacgcaatcgccctattataagcatgtgccacattatctctgcttaccagggcctcaatccacaccttctcttctttaatcagtcctgctttataagcagtttttaatacctgtctgggtgaacctgtcgcactttcctcaaaaccactgtattctaatatttctttcatagccttccacgactgctcaaaacaaatctcatacaatgccactaatcctgttaagactacattttcatatggctctttatatttataaacatcacttaagttttccaatgccaaacaaaaattttcaaactttttcatacaacacctttccctccttcttaattgtctcccttaattcttcctgtacgcttccatccagattcactatatcatactgcaaaagagtactcgtttcctcatccacagaaattgaaaagccgctaacatctccacctgacacagccagatcaatatcgcttacttttttatagtctcctcttgcccgggatccaaaaagagtcactcgatccacctcatatttctgtgccaaatcgcatatttctttcaataatttctctttaattcctgaattaccgaacattcccttttcatccttattacgggtcaagagcgcaacggtttctatgtgcggtgggacggatattttatactacatggcaaaaaggttacccctcaattctaccactgtatatctattgcctatcttttaccccttttggtagaatctcaccccatttatgagatttcaccccatataaaaagactctacttctttcatcgattacaaattaataatagaaattttcaaatataatatgaaaaacagaaagccattctgattaagaatggcaaatcgtttattttgttctattctccaaagatttttttaactaatttttcggcctcttcatcgaacataaaatcaggttgcccttgtctcgcatagtaagcagaaaagcgacttagaatatccttgacaaaatagtcagatatatgtaattcggatttctcaaataactcatttaactcatctggtgaataattatatacatgtctaaagtttatgtaccccccaacaaacaaatcattttgcggcaaccaatgatagtattctgtataactattagtaattgctttttttaaacacttggttcttttagaaaatgttgacgcttctcctattacttcccgactaatatcctctaatggttctatttcacaaagcattacagtatctgttttcattttcccatcatgaatagccaaatcacaaggcggtgacaatactacataatacaaattatcttctttgttctttataaccgaacctgttttaatttcctctgtaattggtggtttgatatacatttcttgcgttacgtactttggaacttcataatccaacaattcctgaatatgtgaaatagcaaatcgtaaaagaatcttttccgtttcatatccttcttctttcaatctttgccacatattaatctgtggatataaatttttccaaaatatttgattcatagttgattcgatgattcccttacccccaataacatcaaaaagccccgtgttcattgccttaataaggtcatttacaatatcctggtattttttttcaccttttttgtatatacgaataggcgatccttcttccaaaattgtatccggtgttcctgtcataacagcaaccggcaaccggtatcgagttattatttcctcaattatcgcattacccgtattttcaccatttagcttaatatcaacaatcgcgcctgtatattgcatataatctttattcagtttttccaaagcttcttcgtaagacgatgctttatcaacttctatctgtaattcagggttttgtttattcattatagcaactgaatccttacatgattttacgtcactttcggtatcctctaccagtaaaactttatacatatacttaccctctctacttttgtattagcctaaaatgtgctccttcaccggactgtaatgcaattaattgtagtccatttctttgagccgcttctcccgcaatggaaagccctagtcccattcctccaggttttgtcgtaaattcaggttcaaatatcactccactttctaacaaatcagcttcaatacccggtcctgtatcttggtaatccacataccaaactccaccatccgctgaaattattattttgatttctctcacgtctgactttttttcatgaatccaataaatactgttgtcaattaggttagtaaaaattgtatatatatcttggcgccatccaactaaagaaacatccttatcagaaacaacattaatatttatattttcttttttaagttcattttcaaatacagatacaactccaccaattatttcttctaaaattagattcttcttcgtttctcttttttttgcagccaatggatctaaacggccaaacaaatttacaaatattccagcattttctcctatcccttctgttaattcaataatcttagatacattttcatcatctggctgtttttcaaaatcttctgcatagaagtttagattaggtatctgattagtaaaataatttaacgggcgtctaccttcgtgtaatataatatttactatttttcccaatgttgcctgaccttgatatactgcaacagcttttctgatttcttctattgattcatttttcttcctctgctcgttattaattatagcctcaatctcagatactattttatcgcccatgccggcttttgttaaagaattagatatacttttctttaatggttcataattatacaatccttctaattcattctctattttctttaccggattagaaagaccaattctacgccgatacataaaacgccttttctcaagctcaacaattaccaattctgtcaactcttttaatctttgatatgctaaattatcttttaaaccatctcttgcactcttttcctctaaatgagaaatctcttccgattggatatgcacataaccaaccacctgattactaccaattttcatagagggattctggatacgtttctcatttaatttcaaccaatcaaaatctgaatcacctaagggacgaattctaaatccatttctgtaaacaccaattccattaacttcatttaacagctgacgtgcttgcaatcctgaaacatattcattggtcttttcatcttttaaacctcgtgcaataagttgttctattgcatctttatcacgatcatatacccttatatcgactattagttttccgcaacaagtacatccaaaatcgcactcaattttttctgatgcagcatttcttattttgttattattgtattgaagttctccttttccatcgctttcaatagttcctgtaatttgataatcaaacaattctaatatcggatacggtttaatatcttcgataattaattctttttgatttttaaaaaaattgtcaaatttcattattatgctaaatttttcatcaaacgtattgacaactttggggggaattaacttttttaactcaaatctcaattttcttaactgcctgtcatcccattcctctaagtattcctctgccgcatgtataactaacttagtaccaggtgttttccctatgtttacactttttacctgtattggaacctggtccaaatattcagccttttcaaaatctctccaattaactaaaagggttgttgtatttcctgatttatcagttgtctcaagatataattcttctcccaaaatactaacagcatatcttcctatccccttacgtccctgcattattctaccgccaggactttttcggtttttaaccttataagaggtagatggtaccagccatttatctataacatcttcttttgacataccatgtccatggtcttcaacaattatatctaatctatctctattttgattgctaagaaaagaaattataacatcttccgaatcagcatcataagcatttttcactaattctactagcgctgcaaactcatcctgtattaaatcttttccaatcgttattaaatgacgccccgctggtcgaatagtataaatattattctcacccattaccacacctccaataatgactttgctattatttcagctaagcaaaccggcactgcatttccaatctgtttaaatgcagttgtccgagatggtttacccgatacagattcaaaataaaaatcatcaggaaaagtctgtagccttgctacttccctaggtgttagcgatctattttgtaaaacatctggatgaataaaataatgtccatcttttgcaatatgagctaccactgtttgtgaacaatcactatccggtgctacaactttgaatctatccaaaaaagattccttattattttgagattgtaaatgttccggtaaatcaacatagcttagtcttttatgttcattagtccatagattcacagcaattttgtaaatttctttatcttgttcagtattaggccgggcatcatgaaatgtaaccatttgacgatttatattttttatccctgcttcatacagatatgtgccttgataatctaaagtttctacaggttgcgcactgccttctcctgcttgtagaaagggtaggtctttaaatatttcacccacaacatatttcctttcctttttacatataaccggatagaaatcttcttcatttccatatttaccaatcagaataatcctttttcgattttgcaatacaccataatctgcagcgtttaatattttatattccgtcttgtatccacattcttgaaataaatcccgcattttattaaaatgtaattgctcatccttatctttggcagataaaagtcctgttacgttttcaaatacaaagtattgtggttgatacttttttagaaattctccatataatttatataaataatttctcttatcacccaacattccattttcatctcgagctctcccaatcaacgaatacgcctgacatggcggtccccctactattaaatcaatcttttctccttttaagttctcatctattttcgcaaatacctctaccaaattttcccatgaaatttcatagtttaatactgtagatagtaaagtttccggaacttttgcataaaattcctttcttgttatctcgcctgtaagataagagtcataaatatctgatttatcgtgattcagtagccatttataagccaacctggtttttaaggtataacaagcagcggcatccatttccacatgtgacaccggaataaagccagccctcataaatccctccgataatccccctgctcctgcaaaaagatctaaatacctcaatttcgccattttgctactcctatcattttacaccttatttcgtctgtgttatttctaagtatagtttatttaaccgttctgtttggtttttcttttttaattcgcactcccaaaccacaataactctccaacctaattttataagctcctgaatctttatagtatctcttcttttattccctaataacttattttgccaaaattctttattattctcaggccatttaaaatatctgcatccttcatggacatgccaaaaacatccattcacaaaaataacagttttatatttaggtaatacaatatctggacaacctggtaatttatttacatttttccgatatcgcagaccttggctaaacaaatattttcttacaagttcttctggtttagtatttttatttcgaatccgagacatgttatagcttctggtttcttttgtatgcacatccattttatcacttactctttcacatattgctgttgtcctgaagtagttttttcaacagcctgtatatctgttttagatgtattcacatgattaagaaataatgttcccaacagcaatctgtcactccgggaaattctattccattcatagcctttaaataggtcttttaataaaaacttttctcccgaatgtaccttttgggtttcatttattgcacaatccaatagttctctcacttcatacatctcatttcctccaaacatctttgaacacaacgatattaatatcattatacaatctactattaaaattgcaatagaatatcgtattaaaacatgcaaatattaatcttttacttgtttgtacctatatacttatctccgtcccatccaaaaacaccgtcaccactatccctctctcatacaccttaatataatccaccgtccgaagcatcaaatctatatccagcctccttattggctgtgcatccttagtaatctccataaaatccatcgcccggaacctcgctagcaaatcctcaccctgcatcttctcttcccactccggcaccagtatatcccggcactccaacagtcggttccacgccatcagataaatctcaatcagcgtctcctcataaatatgccggtttccacatcccagcacacctttcaccttataccgctcactgcactgccacactttcctgtctccgcccggtgtccgccaccccttccttgcaaaagccctgttacactccccacagataatcttgctggaaaatggatttgcctccgtattctgagaaaaccgtgtgatattatgctcctccagatacctctccctccgctccatctccaactgcacacattcccaaatccaaggctctataatcgcttcatgatcatcctcaatataatactgctggatttccccctcattttgcacccgcttcttcgtcaggaaatccactgtgtaacttttttgcaagagcgtgtcccctttatacttttcattctccagcatactgccaatggtcgtggactgccatttcgtcccgccatcccaatttatcacaccttccctttcaaaaatccgcttcatataatcggtggtttttccccacaggaactccataaaaatccgcttcacaatcttcgcctgctgtttattcacaaccagttttccattctcatcagcatcataaccaaggaaccgcttggtactcatcttatgctgcccgatctcaaatcttttgcgtataccccatgtgctgttctctgaaatattccgactctcatcctgtgccagagaagaaaggattgtcagcagcacttccccctttgcatccaaggtatcaatattttccttttcaaatgtcactccaatgcccatccccttcagttccctcacataattcaggcagtccagcgtattccttgcaaaccgggagatggatttcgtgataatgcggtcaatctttcccgccctgcagtccataatcatccggttaaattcatctcttttcttagtattcgtgccggaaattccctcatccgcatatatcccggcacactcatattccggattgctgttaatgctctccgtataaaaccgcacctggttctcatagcttaatagctgttcttcttggtcggtactcacccggcagtacgctgccacccgcagcttcttcctctgcacggtattcccttcccttgctatcaaattctgctttgctggtataacggtaatgtttcttgccattcctgaaaacctcctctgccaccgttggttctataatatcctgccgggatgccgattcatctggaatccgcacacccggacaggcttgcttcccttcttcaatataagtggagcaaagccactccaccttctttttgtacccaatcctgcgccggagtgtctttccgcaatgcggacagtacagcattcccgtcaatggatatctgttctgatacttttgtgtgtcactctgggcaatgttcctgccccgtttattttcttctatcttatcctgaagggcatcccaaacctccgtgctcaaaatcgccggatggctgtcctccatataataactctgtacttccccatgattccgtaccgtctgattcctcttatcctccggcgtgtaatatttctgcaaatggaaatcccctttgtatttctcatttttgaacattcccataaacgagccgcctgtccacttccctcctgtcacggacggtattcccagaaaatctgccaactgccccaggcggctggaacccactcccaaaaggtacatatccgcaaagaaccgaactgccatggcctctttagaattgatgaccagttccccaaactcatccttgtcatagcccatgaaccgctccgtgttgatcatgtattccccacgctcaaacttcttgcggatagaccatttccggttctccgacacactcctgctttcttcctccgcaaaagaagcaaggacagtgagcatgacctcaccgtccccggataatgtgttgatattctgttcttcaaaatagacagcaatcccaatcagccgcagtaccctcaccgtttccaggagaactgctgtatttctggcaaaccgggaaatggactttgtgatgattaaatctatctggccatcctttgccatctgcaccatccgctggaattctggacggttcctgctgaaaccggagataccctggtctgcaaacacaccaataaactcatattctgggttggctttcagagagcgttcataggaggatatctggttttccagggattcgccctgtttcctggaatctgtggaaactctggcataagcacagacgcgtttctttttcggatttttattctgtaccggctctaacatccgtatcctcataaaaccttctctcttccaaagtattcttttacaaaccgcttcacacattcatactgtttccctgcgtctccgtcctcattgatacacaccacaggaactcctgctttatcacaggcttccataaattcaaagaactgccgccagttacgggcaatcatagtggcatctcttgttactatcacacggacatgcccggcctggatttctgcaatcaactgccggaacgctttccggtttgcgtctacgccagacgcttcatcccaaaagaaatgttcttccaccgtccgcttaccatagcgcctgcggaatgcttctctccccggttccacatatttctcatatccatgatcccggtgtgtggttctgtaataatatgccacctgcatcttcatccagcatcccactcctttcgttttggtttcccattgagcaatctcaataagcgtagtctattaatcactctgaacgccctataagtcaagcagataggcggtttccacgtcttttcttttggtctgcggaaacttatttcagaaggtcaaaaagaagaacccggcaggtttccccgccgggcaaatctctatatcctcgtcacataatccagcgaaatccacccgtccctcttcttctggtaagatttcaacagcccccacttagaagccccggctccgtccgcctcctccacaacagtaaaaacaccaactccggtaaacctccccgtccttgcataatcagtccccggcccctttcggatattcaaatccgggatgtccaccttcaccatataggaagatgcctccggcagtttctccatgaactgcacataccgcttatccgaagtgataaacagcccagatttcagcttataccacagcccgtccgcactgacacccaccaccgtatacgcgccgtcaaacaccacttgatctacgttatcccccatacatggtgctttcctcacattcactccgtctttccccttataaaacaccttcacaaaaccggacagtggattaaccggctggttcggattccccgaaccctccatgctgctccccgtatccccgccgtctccaatgatattcctcaaaataataagaatcttcccgccatacccagccccggcagcccagccctttccccgcggattctccaaaatccccagccattccacacaaggtgcgcaacctctgaccacatatttgaaccgtgggtcaacttttggattcaccagcttatccgtacacgcataggctttcagatgctgcacctgcgcccggatgcccctctgcggcgcattaaaagaattccccttcttcccattggaagtcacacccatcccacagaaattattctgctccagcgttaccgccgaaccggaaaagccaaaattccccgtctccagacaggactgcgcaaaagcaacatcccctctcacgccctctgcctctccttcggacagatacagcggaaccatatccagcactgactgcgccacttgcggattcttccctttaatatacgcccgcatctgctccaccgtagccacagcctttcccataatcttcatataggaagaaacatcctccccatgcgcagagccgccgctcctaacctgccgtttaaactcctcccacatccccttcgcccggatttgggaaggacagttcttcgcacacacatcataatgctgcaccacccgttctgccggaatccctgtctccgccatcagataccggacaaactccaccatattggcaaaggctctctgaaaatcataccctgcctgtacacacatctccacgccgatactgtttttgttattcaccgtcccaaacagccgtccaccataattcacacccacatgccagcatccccgcccatgaggagccgcctgatataccgtgtctttatcatccgtgtaataatgaacagacgtgcttaaattcccgttatactgcgcccttgcatgggcgctggcatctgcccccaccgcaaaattatccgtattatgcactacgatatactgcggattattgctctcatacgtgttattgtcagaaatataattcttatttaccttcatgtccgttcccctccttcaactgctccagcacacttttcagcttctccggaatcggcagcccaatcttcaccgcattctccagaatggaaattccctcattggacagatagaaaaaaatcaccgccgtccgcaatacgctcccattcccaatcacatgggtatcgatgatgtgcgccacggcaaccagagaaaaaatgaccaccttcttgaaaatcccccggaacccaatctggctggaaagctccttgttcagaatccccaccatcaccccagtcacatagtccactaccacgaaaacaatcagtgtatacaaaaatccgtcaaatcctcccattaccgcccctaaagcaccgcccatagcggcaaatacatactgcatcgtgcctgttacatctctcatctcaaatccctcctgttcttccacacaaaaaaagtagcccgttttggactgctgcctgtttctgattccataagtttttttctctaccgcccttacggcacggcctcctctgtcagtgtataggtaatcttcatcgtcttatccaccgtcttcaccaccgctgaagacaggttgttgatggatgccagatagggagtcagcaggtacatggtccggtactcgctaccgtaactccctccccaacccagaaggaaattcttatactggaacagcggcgttgccgcatcattcagccggaaactcccctgggtgtgtattaccttgtcctccaccgtaacctggaaatccccgcccataatcaaatccccaaccagcgtcatatacacctcgcaggtccctgtctcgcacagcggcttccatttggaagtaaaccccagattgatcagcgtcacatctgaagaattggaaaggttaatcttataaatccccttcttgttattggccatcacatacaggtatccgttccgaatgcagcactgcagataccgctccgggaaagaactgtcctcctcccgccgccccacatccatcagcttcgcattggacagcgtccactccccctctgtcatggaataatcctctttcttaatcttcacccacaccatagtggcgctgccggaggaattcccctcattggaaaacccgtaccagtacccgtctctgccgtccagaaattccccgtacagtgtgtaatccccaaggaaccggaacgtggaagtctgaatcacccggtcatccaccaccgcaaaagatgagtcatccagtttctcattcagccccaccgtaaaaatcgggatatgcaccttccgaatcctcacccctgtgtcctgaaacgtgatggaatacagcaggttcctttcaaaatccacctccaccgtctcaaatagcaccagcttccgcaccatagtcatcccgtccagcttaatgcttttaatctgcaggaatgtggaactatcattcaccaggctcccataagcattcgccccgccctgggcgctggtcagggcggccgccgcaatggtaccgttcccctggctcggcgtgaactcccacacaaacttgtatccattgtccagcttcttgctctccgtcaggttcatgcttcccctcgccaaattcgccgtggaattcacattatttgacgcataagccactggcagattatccgacagggaataaatattgtccaccctttcctccagtaccttggaaaacagcagaatccccccaatcatgttagggcagaccggaagtaatgcctcctgccattttactccgtcaatactctccccgatttcgtaaaacacccccatgggattcagccccaggatatggttcaccgcatccgttaccatattttcttccgtcaccgccgtgacctccccggtattcacatccgtcagttcaatcctcatcgttcccgtcagtctcataacgccctccttaactcaaatctaccggacatccaaacgcgcctactgaaatccgccccatgctgtccaccatctgcttctgtacaagctccatggtttcaattccaacggtctccgcaaaccctctggtactcaatcctgtgccaacctggaacacagcagccgtatcttccaatacaatcttcccatcccatgccggatccgccgccatgccctgcccgctgatggaggcaatgcatcccccggtatcaatctgtccgctgccgccctccaagcgaaggaatacctggaacgtgttcgtaaagttgggaattagtttctcaataggataatacaaaggcagcacatgcttcccactcccccaggtttccgccggataatgggttaaaatttcttcgtcattgaacacatactttacacgcgccacagctctcccgtccgcaggaaccgtgaccggcagttccgcctccacgctgacatttaccgtagtttccgttccatcctcagccacagatggtaccgggacaacaaccgttccctttgccgttcctgcctgtaccgctgcatttgctgacacatccatcagcacaattgcaaagaactgtacgtgcgtctcctctgccgccgcaaactcaatgctgataatcttcacatccgtatcattcaccgtataggctgatgcattagtaaaagtgtgaatccctatctttccagcctcaatctggttgagcaggccggaaatgttcttgtcattcttcgacttggcctgcgccagtctgggattcttccccacacatttcaaggagtgtctgccgttaatcttaatctgatacccagtcacacaggctaactgcgtttcatccgcatggccgccagaaaacaccagcacatctcccaaatccaatgccgggttgccgatagtgtccgaatcaaatggaacatagcggatgaccgataaatcagacaggatattttccagcagtgccttcctcgtctcctccaggccaaactgcaaaaacggattcactcccagattcatggtcagcccgtcatctgtttctaacgcataatactctgctgtctgcgttttgatatttgtggaactgattgcggtataccgggtaataaagtccgaaaagctgctggaaaaccgctgcctgtcggacaccgtcatcacaggcatattcctgtatttcctcagttccagctttcccgtccggttaatacagaaaaaccctcccagcacctgccccacataatacagcacatcccggtatgtctcaatatcattctcagtatacactgacagcagttccgcaccgtttggcatcgcctcaacctccgcctgggtatgggcaagctccacgttacaggctttacagcacaaagccagaaaagcataagcattccccacagtctcaaagccattgaagcttctctcaaaccgcagcatgtaatcatacgcctttatctccagacagtgcagcgtccgattcgcctcgcacacttcaaaaatccccatggggactttctcaaaactcccgttcccaagccgcagatgatagaacagttctatcttcgcatcctccagcgtatatcggtcaatctccgaaaacagagtgagtcccatctccgccgcatacaccgtgccaatctcaatctctgtgctaccacagcactgccctgtgatgtaaccagagcctttcacgatatctccattcccaaactcatggaccaacccggatttcgtggtaattttccctgtccagtaaaaattgcgggtgttttcctgcaccgcagataaaaattctttactgactggatacatgaaccccacccctctccttaaaactctttcaaattaaacgacactttccacagccctttataggaagtgtctttcaccagcccagccttgtagccctccataaacatctccgcccgcttcacctccagtgtctccgtatcaaaaaactccactgcaatcttcggcttcctgcggaaccccgccatggccttcacccatttcgggcttagcgaaaaggaaactggaattgtcactacgccgctcctgaccacatcccgctgtatagtcccggcctccgtttcaccgccggaatccgcctccacatccgccatctccacttcgtaggagtccggcattggaagcgccaccccgtcaaacgtcagatactgtataaacgccatgcctatctacctcctgatctcagattctgcctgttctgtgcattcaccaccacctcatccaataacgtgccgccaaggtacaccgggatacagatcgtccccgcattcgccattccaaacccgctcactgcctcccggattccgttcaataactgtgtgacgttattggcagaagccgcctgctgctccgctataccggaggccataccaatctgtgggctgaccaccatatccgaggccacgccccggaccgccttctcaatcatcccccggcttccctcaatccccctggcaagcccggacacaaaatccggcatccaggattcatactccgtaagcggcccctcatccggcacggagaaatggaggaacgccgcaatcttatccgcaatgctccttaccgcatccaccacattccctacggcattccggattccgttggcaatcccgttcacgatatccacaccccagttccacgcactggaagccagccccttaatataacccaccgcctgctcaaacccattcttcaccgcattgtaaacgttgctcatggcattgctgattccactgacaatattattgaaaatgttcgtgactgctgtcttaatagcattcagcacagtcatcaccgtattttttaccgaattccacacagtagatataatactgcccaccgtattcatcaccgtagttaccacatcccggattccattccacacagaagtaacgatgctttggatggtattcagcaccgtagaaaccaccgtctgaatagcattccacgccgtagtcaggaaagcctgtacagccgtaacaactgtagtcaccaccgttttaatggcattccagacagtggtgaaaatcgactgtataacagtcagcaccgtggtaataatcgttttgtaaatgttaaaatatgtggtgacgattgtggaaatcgccatcagcaccgtctgaaacaaagttttaatgccctcccataacgtggagaaaaatgtggcaatcccattccaaatggtctgtgccaccgtggatatccccgtccagagcgtggaaaaaaactgtgaaatagacgtccacacagcactggctgtctgcttgattccttcccacagcccggcaaagaattccttcacggcattccagatattcatgcaggctgcctttatttcatcccagtgggcaaccagcagcttaccaatggcaatcaccgccacaatcacagcgataatcgcaagtattggcgctcctacgctggcaataaccggaattaatgcagaaatagccggagcaatcacacccaccagactcatcactgcgctgattcccgttgcaatcttcccgatgatgattaacaccggccccacggccgccaccaccatggcgatgatgacaatcatcttcttcgtaccctccgacagcccggaaaaccaggaagtaaaagcctgtatcttatccgccagcgcaaccagaatcggagccagcacgtccataatggcggagccgaattcaatggcggtatttttcaactggttaaacgccttctgtattgtgtaggaattagtgttcagcttcccaaaagctgcctccgttgcccctgtggaattacgcatctgctccagcgtcccattgaacgtttccgcactgtcccctagaagaatcagccctgccttcccggcctcagcactcccccacaaatcaccgaaggccagcccctgctccgccgcgctgtcagaaataacctgcagcacctcggaaaggctggctccgtcctgcatcagttccaggaaggatttccccgtcttttccttcaaagtgtccgacaccttcgtgcctgattttccaagctcattgaacatggaattcatataggtggtggattccgcagttgccacaccgttggcagtcatcagggcatacccggtcgccacctgttccaacgccaccccgtttgcttttgctgtgggaataatcttacccatggaggaggacagttcccccaccgtggtcttgcccagattctgcgtctgaatcagcacgtcagacacccggcctacctcagacgcttccaggccataggcattcataatcgtagtcagcacatccagcgcgcttcccgcatccgcaaacccggccctcgccagcttcgtggagttagaaacaaaattcaccgcatccccggtcttctgtcctgcggagatggcatcatacacattccccgcaatctccgaagaactgatacccgtctggttcgacaaatccagaatggccttttccagttccgacagtggcacttccgtggtatccgcaatggtattaacctttgccatggcatcctcaaaatccatcgccatcttagcggatgccccgcccgccgccgtaatcccggctgtcaccgggagtagtttcttacctgccgatgtggcggcatccccaaacttcccaaccttctccgccgcctgcgaaaagccggaaagggatgtgttcgtatcctccgcctgtttttccagattctttaaattttgctccgtctcaatgatttcccgctgcagggcatcgtactggtctttggtaatatcgccgcgctcaaactgctgctgtacctgctgctgggcagatttgagcgcctccaacttctccttcgtctccccgattgcatccgttaaaagcctctgcttctgcgccagaagctccgatgtttagtgtaaaataaaattaccgaaagttgcaaaacaaaaatggagaaagttgcatcgccattttggagaaagttgcaaagcttcgtacatagctcgcaggaacgggcagcgccgatatctggtagctcccaagtatgagccatgaaaagatccattgcagacatcacaattatccgttaaccttatctttgttgtagccaaacaataaagacaaggaggaaaggagatgtcaactacaatggatcagatacatcgtatcagagaaatgttctatcagcaagataaaaacatttcccaaatagcatctgagactgggtttaattggaaaacggtcaaaaagtacgtggatatggaggattttaatactctatcccccgtacccgcatcagaggtggagcacgagtcaaaactcgatcccttcaagcctctgatcaatgagtggctgcaagccgataagcttgccccacggaagcagcggcacacagcaaagcggatctataaacgcctgaaagaagagatagccgattttgactgcagctacaggctcgtggctttgtacgtcaagcagcgcaaagaggaactaaggatcaaaaaatcagatggctatcttccattagttcatcatccgggtgaagcccaggctgatttcggatatgctgatttttacgagaatggaagattacatcatgaggccaaatacctcgtgctaagctttccgtacagcaatggcggttatctgcagctcaactatggtgaaaacatggagtgccttctggaaggaatggtagccatgtttgaataccttggaggcgtacctacagagatctggtttgataacaccaggacaatcgtgaccaaggtgatcaaaggcggaggccggaacgtcacagagcggtttcagcgcttttgcgagcattaccgcatcaagcctgttttcatgaatccaggatccggatgggaaaaaggaaacgtggaaaataaagtcggctatctgcggcgcaatgaattggtccctgttccccgctttcagtctctgaaagaggagaacaagcatcttctcagccggtgttacctggatatggaacgtgagcattacgatgatgacagcggccgtctgatcagcgagcggttcgtggaagacagggcaggactgctcccactgccatctgttccctttgataccgctcagtatacgagtgtccgaacggataaatatggccggtttaccctggatgccggaaagcaccgctattctgcttcacctgcatactgtgaggatacggtaaatctcaggatcacatccgcagaggtctctgttatgaatcaggacatgcatgaagttgtccgccataaacgcctttatggagacgataaggagagcatggactggatcccatatcttaagtatatatcccgaaagccgcgctccctcaagaacagcggcatctatgatatgatgccacacagcatgcagttgtatatggacagctgtgagggctccgaacggggccgtatccttaaagtcctcactgagttaacagagcgaagcggctttggcagcgctctgacaacggtcgaggaagccatccggcttcatgcaacagacccggacagcctgaaaagcctatgccggcgaacctatgcagatgtaccgttattgccaccgttggaaacggatacggcaatcccatcgcagaaggtcgtcctgtttcggaacgaccttcccagcctggatgctgccctgacgaggggaggtgtttccaatggctgatagagatctggaaagatccattgccgcatgctgcaagcagttacgcttatcttcaaaccttgccgagcaggcaataacactggaaggggggaatgcccaggaatatctgctgaatctgctgacaaatgagatcaaataccggacaatacgcagacggacaaaatacctcaatgctgccggatttccccgccgttactctgccagtgaattccgtacagatgaaatcgatttcccggaagaagtaagtctgaacagccttttgcaactggagttctaccatgccggaaagaacgtcatcatgtacggaggtacaggaaccgggaagaccatgctgtccattctgattggaatagctgcctgtaaccaggatatccccgttcggttttaccggactgcaggaataatcaacctgttcgcagagagcaaggccaagggcacgctgacacagtttaagaagaaattgaacagcgccgggatacttattcttgacgagtttggctatgtgccatatgacagaaccgggtcacaactgctctttgattatctctccgaaatacatgagcagaaatccgtgatactgaataccaatctggagttctcacagtgggtcaatgtcctgtatgaccagcgaatgacgacggcactcattggacggctgacgcatcatgtggagttgatccttttccctggtgtgaataaccggctgcgagagtccagtatcaaccagtcaattccaagaatcaacaggcgggaggcagaaaacaatggcgaagcacaataaagttatcaaagagcagactaaaatctatcaagaccttctggaacgatatgaggaaatgagcgatcatctctccggtctgatagaggatcacaaccgcacagaagaagatttacggtatctacaggaattcgtccattatagaaaacttgaggatgatttccggtatttcaggaagcatgcgcatgaggaatacgaagaggatatgccttttccttatctcacgctgtaacaattaaataataatgtctgcaatgcctattcgctgactccaatgcgggtcagcagaggctttgcaactttcgccaatttggagatgcaataatcgccaaaaatgttttgcaactttctccaaaaagtgcttgcaaaaaacactccgaattatgcgggtccagcttcaggagcttctccacatccttaagctgggactgggtgttgcggatttcagaattgacgcctttcagcgctgtggtcagtctggtggtatcgccgccgatttccaccgtgataccctgtatgcggtttgccatgcgatgcctcctctcccgtttttggacagaaaaaaagtgccggttaaggctcaagtatatggaaaaggcacctgccgtatttggacagatgcctatgtatcaatactattttatttataattctgctcattacaaaaccggaaactatatttctgttttcagcagtgaatacattttcatgtcgattacttcgccgttctttacagcgttacttcttaatgtgccttcgtattgaaaccctgctttttcaagtacacggcaggatgcggcattgtatgcgaacggctctgcataaatacggattatatcgcttttctcaaaaacatatgcacagatctgtcttacggcttctgtcataattcctctgccccaatattcttccgcaatataatatcccagctcggcagtctgcctgtgtatgtttccctgtcggaaaatcccgatactgccaaccaactttccatctactgttatagcaaaagcaaatatttcattttcatctgcggaaagcatcgcagagatatagtccgttccatcctgctcggtgtaaggatatggcaatccatcccggagattatcctgtatttttttattggaaagagccgccgctaaatcggttgcatccgataactcccattttcttattctacaaatcattttcctttgtccacctccccgataaatttagatttttattattgtataaaactataatagcgatcagattaccattcttcttccaattattcaggttcactgctagaagcacttcgtatcatatcaagattttgtcctgctattttacgtttctctacaaaatccacaaaaaattctttaaattcagctatttcgctttttccatctcccagatatccatatatattctttaataatccaatagaaaagatgcatgcaagttcaaatgtagatcttccgccttctggattgcgaatccatttcaacgaaaatccatttctatctacactcatacccattgtcgcatttaatccatgtaattcaaatgataatccgttataaatagcatcataatattttccataaccgacctcttttatcaaaccatatatacttgttatattactgcacacttcgtaccactgaatatatacctttttcttatttacactccgtttctttttttcgtctaacttcttttttctagctatatctgtttcttgaaaaactgtttttgactttatcaaccgttttaatgcttgctttttcttctctagttttttacagtctttgtcaaactcatctttccctttttgagcaataattagtttcccatattcagattcagcattaaaataattttcacttttttctaactcttggtaatgatgttccaaataataagctgctgctcttttttccgtatgatcttttaatataaactccaacccaactatgttctctatcatagaacggagtataatctgcgctggttcaaataaacctacagaatataaaacattgatagaatccagttgttccatgatttttcttataaataaaataataacagtatcaacaaaatcatctattcttgaaattccggttgtcatttcattttggatttctccaaatctggtaataactgaatccaacacataacttgcttgttcaatagtttcttttacgttctcgtgctcttcaatattaaagaacagattatcaaatatttttaaatacgaattctgcatagaaacctccataaattccgattttacgctgaccaagccagtcgtttccctactagtatagcaggaaacagccagccaatcaacggaaatcagaacctgtcgaagtcctcctgcgtggccatctgtgcatacttacactcgtcattcctgctctccgcatacatatcattaatcatcccgatagaaagcagttccaactcatgaatagaaatcccaagctgcacacaccgcaggaggaacagcggcgttgtcatctcccgctcagtcgggcgcagttttttttagcctccacatccgtctgcacattcagcccccaaagttcaatcagcttcggcaacacctgatagatagagaacgtattgaacccgtccagccattcctccggcgtgtccgggattgaactattcgcatgctttgccatcacaaaagcgatgttctcaaacatcttggtgctatgtcaagaaaaagtacaagttaaacgtgaacttttctagtaacacctgctattttatcctgcctgtttctccatctgttccaattctcgatgatacttctcttcatactcatttggtgaaagatatccacaatggctatgaattctcactgtattataaaatgtttctatatactgaaatactaatctgtatgcatgattataattgaatattttgaatcggttgagccactccctttttattaatgcatgaaatgattcgatacatgcattatcccatggatatgccttctttgagtagcttcgctgcatcccctctgtagcttccacataatccctacaaacatactgaattcctctgtctgtatgcataatccggggattatccacgtctcttgctgcttttgcctttcctattgcctctataacccattttgcctccagggtatcacttaatacccatgctataatctttcgggagaacagatccataatgcttgtcagatatacaaagccctcaaaagtccatatatatgtgatgtctgaacaccatactgcatccggtttctcaggattgaacttttcatttaatatattttttaatttactgctgaaatcagaatctattgtagttactgtatagggctttatatattgtgcctttataccaagttctctcatatagtttccaacggttttttccgatattttttctccttctttccgtaaacattctgtaatctttggcgcaccatagttctgatgcgaatcattatatatggcaaggattctttctttaagagctgcttttcttttttctctgtcagaaggcatccttcttttccagctaagatatctacttcttgaaacgcctaatattttcagcacaccggagacattcagccggcgttctccctgctcctgaagctgcccttcatactgggcagtttcaagaaacaaagcttctgtcattttcccagtatgccgattgctttttttaatatatcaagggcatcctgtgtatccctcagttctttgcgtagacgtgcaatctcctttgcctcatcgcttacaaaattccctcttcctctggtgggtactgttccttcgttttcctcatatgcctttccccacgtagagagagcactcttactgattccaagattttttgcacattttccaatcccaagctccggatgttccttccagtatcttacggcatctctcttaaattcttctgtgtactgtgttgccatgtctattcctccatttgttttctattatacttgtatgtcaagaaatttccatgtctaacttgtactatttatattctagcaccatctccaaagaaaacaaatccagaccggattccccttcctcaaagcctcccacgcactgctccaaagcccgcaggtccctgtaaatatccctctggaacttcaagcggtaaatcctcggtatagccgccgatgctttaaacagcacctcctgcccgtcaatttcaaccttccttgttatgctcatttatccgccaccgcctttgccatagacttcacttccgcagccctgcccgcctcctggttcagggcaaagctggccggggccggtgtttccggctccgccgcaggcaaatacaccgccttataccagtcatcatacacttttgccgtagttgcatccccggtctttgccttcacataaccggatgccagcggcctagccttcaccgtcagcgtctctgtctgcacctccctggattcctcgttagtcttggattcaatcttcgggcgggaagcagaacagttatacagcacatgccggattttcttcacgtccccgtcaaactcaaataacagggcaaagctgcccgtctccgcattgcagttctccaccagcaccttattggtgtccgcctcttctttcaggatatccgtccggaacgtctccggaatcatcgccagctccagatccccgtcataccccatattgttattgatgacgtaatattccaccccatccgcataaaaggactccggctccccgttggggtccagacttaaagacactgcgcccggcatcgccaccgggactccgaatgtgtccgtcccgtcctcccctgccgtcaacggggcatagtggacattgcagatattaaacttcactttatttcccattcctcaaacctccatttcatatagaacctcatacagccgttccgactcaatccatacttcactcctggcataaaagaagccatggctttccagcacggtctctatccgatcctccagttccacagacttataatccgtgtacagttcaatatgcagcttccgctttttaaaataagcaatcccatctgccgcaaaattccgggattctgggtatagaaacaccaggaacggcggctctggagactgtccctccgcaaaatgtccataagcacaaggcagttccatttcctcaatcatctctagcacctgctcatgcatcaatgcgataacccccgttccatcttttccatcaactcttccgctccccgctgttctgccggggcgatatggggaatggcagcaacccggtctccgttccgtctcgcgtgaccgtgttccagtagatgggcaatctggtaacggtcacggctgtgaatcaccatagtcagggaattggcatcctcctgcactttctttgccgcccagctcttcttatatttcccagtcctcaccggagcattagcctgaatgtcctttttcacggaccggctcacctctgtcacgctccgcttcatcacctcattggacaaatccgcatattctgccatggactgagcaatggcctccgccatcccgtccacgctcacccttcggtccgtcatatcctcacctcttcaccctctccgcccgcagcttgataatcttattttggaactgcataaaatccaccagcgtgatgttataaatatcgccccggaacagaatccggtacttcgtgctgtccaagtctttcagttccttacagtaccgcaccagaaaaaacagggattcctcccggttcacctgcgccgcctcccagtattccttcccagaaaggttattggcataggcccagcaggtgaaatagtcctcccactcattccgctggttcccgtccttatcctttttcatccggttctgctgaatgacaatcctctgccgccactgcccaatccgcatcagaacacctcatccctctgcccgaacagcaggcatttcaatgtcagtgccaaatctttaaaatccgcctgctcccggttctcatacagataagaaatcccatacagcaccgctgtcctgaccgggtccggcacctccgcgccgggttcaaaactgcaccgcaggatatctttgcaaatactctccgccgtcccggaaagggcaaggagaagttcatcttcgtctgcgctgtcaatccgcacatactgcttgatttcttctaaagtcacaaccatccggcttcctccttcccatggacagacattaagaaaacagcttcctcatcaaagattccagactgtctttatgccccggagcctgccttcatagtcagtgtcttcaccgcctctgccaggataagctttccgtccactctctggcttgctaggaatcccacctgcccatttgccgcaaacagctcattcagtcgcttaaaacttcttccctgccgatccgcaatccagtaataagagaaatccccgaacgccatcaccttcgcccctgccgccagctctggcacataggcagacgtatggtacggacgattcagaatcatatccggctgccctgcctgcatggacggctgccagatataattcccgtttttgtctttcagtttccgcagtgctttcaccgtagtatcattcagcacccaatgggctttcttccggtatggggatttcagggaatagaacagatccatcacatcatcaaaggtgatattcgctgttgtggtagtcaccccgtccgaagcaccgcccgtagcattaaaaatacccgtaggctttcctgtaccatctccgataaagaatgcttcctcttctttagaaccaatccgtctcccgaactccttagagatataagcctccagattaaacgcactgtcattcagcagctcatcggacactttcagcatggtagccaccttataggcgctgattgccacctgcccaaaagcgtcatccgattccgggaacgctccttcctcgtcaatccaggatgcttctcccttacttgccaccaccggaatcttccggtcaccgctggacgtattgatgaccgtggcaatgctgcggaagaagttctcctcctccagcgcatccaccagtgtccgctcaaactcatccggcaccagataaccgccctcggaatctgtccccacctgcagggcattgtttacgtcaaagaagttcttccgcctcatggcattccagaaagtcttcctgtacaggtccgatgccctgccctttttctcctccccgtccgggtcagcgttcggcttattggtaatcggtgtggaagtcggcttattcagctccgcatcaatggcagcctgacgctccagccgctcaatctccttccccagatccaccacatccttctccatcttctcatacgtttccgtatcctccgcagacagcagcccgtcattcccacgcttcgtatccaggaatgcctttgccgcttcccacgcctttgccctcttttcccttagttccagaatcttactcataatcaaatccctccataaatttaatgtgttaaaaggttcagcctcttctccagttgctccacaggtatccttttctcctccggcttgggaagcagcttagacaacaatgagtttgtcactgctgtccgggaaaacatcatcccctccgcccctgttccatctgtcgtatcttctgtcttttccgcaccgccgctcagaatcccgtccgcaaagccaagctccaccgccttcttcgcattgaaccagctctccgcatccatcaggtgtgaaatcctcgccctgctcaaccctgtcttaatctcataggcgttcatgatgctctccttcacctcatccagcatctccccggccttctgcatctccttggaatccccgatagcaatggtcatgggattatggatcatcatcatgcccaccggggaaatcagcaccgaagtccctgccatggcaatgacagaggccgccgaagccgccagcgcatccaccttcaccgtcacatctcccttgtactccatgagcaggttgtaaatctgtgctgccgcaaatacgtctcctcccggagaattgatccaaactgtgacattccctgctccggcattcagttctttttcaaacagcttcggagtcacttcatccccataccacgtttcatccgaaatctccccattcagcacaagagtcctctccccgtccgtctcattccgaatccagttccaaaacttccgcttcataccatacctctccttccatttccaggcatagaaaaagccagcagatgactttccccttcacctgtcggctcctgctctttccctgtattctgctttctgttaaattctatttcttatctatcccctacttattctccatccggattctgtccggcatttctatctacactactctttccggcaaacagccctgcatctttcaactttgtcatgtacccgttgatcagatacaaatccccaccttcctctgccggaatcaggttcatatcctccatttcccggatatcattcccggacagccagccattctgtcttccaatggaatacccagtcatccggctttggtaatccccacggagcagcccgtccacattcagtttcaggaaatactcattcttctcctgtggcagaagcaaagccctctgcagggactgctcccaccggatcacccacgggtccagtgtatacttcacaaactccaaagactgctgctcaatattggaaaaactggacttctccaaatccccaaccatatggggtggaatccggtacagcctggcaatctcattaatctggaacttcctcgtctccagaaactgtgcctcctccggtgggatgccaatctgctggtatttcatcccttcctccagcaccgccaccttcccggcgttcttactgccgccatacaccgaatgccagctctcccgcaccttcgccgggtctttcaacactcccggatgctccagcacaccacctggatttgctccgttttcaaagaaggaagccccatattcctcacaggccaacgtcatccccaccgcattcttcgccatggcaatgggggaataccccaccagcccgtcaaagccaagaccggggatatgcagcacatcctgctgccgcaggtacaccctgccatactcctcaaagttcggattctcgtcactgttcctggtatagatatagtaaagctgcccgttctcatcccggtcagcctccatcttatctggcaggagcggatacagcgaaagcaccctaccgttcccgtcccggataatctgtgcataggcattcccccaaatcaatagatggctcataagtgtctcccggaatacgaaggaagtcatctccgggttcggctcattatggagcagacggtacagcggatggtcatacacccgctcctttcccgtctccgtataacggtacagatggaccggcagggatgccaccgcctccgccagaatccgcacacaggaatacaccgccgtggtctgcatggctgaccgctcattcacagttttcccgctggtactccgcccaaagaaaaaggagtacgctgaaccgccgtagctgtcctttggcttatctctcgcgccccggatgcctaaaatagatggtaatttcatacacacctcctaaaaataagtaaaagaaaagcacctccgaagagatgcccgatagtagtcttatgtgtagtttcttttatttacgcagtactttatccatggctttccctctggcaagctcatcaaccaatttatccagataacgtatctcctgcatcaggggctcttcgatatcttccacccttataccgcagaccacacctttaatcagctttctgttttcattcaattccggggcattcagaaaaaaatctccataagtgaccggcctttccagcatttcttccagttctggctggttgtacccggtaagccaccggattacctcatcaacctcctgccttgtccgcccctttttctccgctttgctgacaagtaaatgataaacttttgaataatccatctgatatactttctcattttccataagatacccctctaatccatatttctgacaccgcttccggctttccgctaaaaatataaatattctgatatattttctgcgcctccaatactttacaaatcttacggatgattccccgtcacataacaccatctggcaatatcggaaatcaattccacaggaaccgtcctgctgtacggaagctgtatacttcccttgctggtcttgtattctttcagacgttcagaaaactcctggacagcctccggccccggatacaggcccacatggtttttaaatccggcgaactggataatattatgctttttccaataagtcggcatactccacgatatccgttcctccgcctccggcagcgccgcgcgcagagcatcccttacttctttcagatactgccgtacttcttccggctgttcctcaaggtatccctcaatcgtttccggcgcttttccgcagtaatggccctgttcctgcctctgaaaagtacgcccgcactttggacatgtccacatcttccatccctcctgcctcattcccgttccctgaccgtaaccaataccctgtcccccggctgtttccctatcctggaacggatatctttacgcacgcctatgatataacatacgctcccgtcagcgttccttacgcccatatttacaacactgccatcatacggctccccgtcaaacgtggcatgtaccttcacccgtccccgcccaaactcttttctgatatcatagggaaaaatgacataagcgccacctgtctccccctcttcatagattaaggattcatactcatatactttactgttcaacgcctgcacctcacccaatccgtttcacacagtataccaaaaatccgcccgatttaaaagctcaaaatccccctgtcatcgtacacgcttcccccaaagtttccttcatttcgtatcgcccggtctagcgccatcaccattgccacagccccgtcaatcttctcggtggacttctccttgtccggcttgatatttcccgccgggtctgtccgcacaaagatattatccatcatccaccgcaaaaccggatgccctccatgcgctatcttcttttccagcaccagttccatcaaccgcttactcggcggtgacatatccttgaagccctgtccgaagggaaccaccgtaaacccaagcccctccaggttctgcaccatctgcaccgctccccaacggtcaaaagcaatctcccggatatggaacttcttccccaagtcatcaatgaaattctcaataaaaccataatgtatcacattcccctctgtggtcatcaggcacccctgcttctcccatacatcatacggcacatggtcccgccgaacccggagattcatattttcctccggtatccagaaatacggcaggataatatatttctctgcatcatccctcggaggaaacaccagaacaaaagccgtaatgtcaatggaactggacaaatccaatcctccatagcactcccggccaatcagctcccgctcatctaccggaaatgcacaggcatcccacttctccatctgcatccaccgagtagactgctttacccactggttcaaccggagctgccggaaaatattttcctccgtcggattatccttggcactcagatacgcattttttactttctctatatcaatggtgtgtccaagggacggattggcttcataccacactttttctgaagaccagtccgcatcatcagaagctccatagattaccggataaaaagatgggtcaatctttctcccaagaataatatcctctgccttctggtgctgctcaaaacacaccgaatttctgtctgtccctgctgtcgttatcaggaaaaacaatggctgtgtccttgcatcaccagagccttttgtcataacatcaaacagctcccggtttggctgtgcgtgcagttcatcaaaaatgactgcatggacgtttaaaccgtgcttcgtataggcttcagcggaaagcacctggtagaagctgttggttggcttatataccagacgcttcacggacatgactggcttgattcgctttttcaatgccgggcactggtccaccatatccacagccacgtcaaacacaatagatgcctgctggcggtctgacgcacagccgtaaacctccgcaccccattccccatcgccacacgtcatgtataaggcaactccggcggccagttccgatttcccgtttttcttcggaatctccacataggcggtgttatactggcggtacccgttttccttcaccgtgccgaacacatcccggataatcctgtcctgccatgggagcagctcaaatggcacgcccctccaacgtcctttcgtgtgtttcaggcagttaataaaatccacggcgtgatctgccttctgcctgtcaaacatcaacgcccaccacctttaaacaagagcagttccatagtgtcattttccttatcttcccctatgtctgatgtaatccggctcctggcagacggggtaagcccaaactgttcacaaaaacggttcatgatttttaaataagtctgtgcgatggaaacctgcggaacctgctgccagtaaccggacggggtttttacgatggtgccgtgctgggtgatgaattcttctgcttccttccaccgggcatatgcctggcaatacccggcaaaagcggccatgtcaatctccgtcaggataccgagctgttcaagttgctttgccatccgtttccattccttctttgcctcatcctccagccagaaaggacagcggggcgctttcttctccggtttcggctcctgtgtatttaagctccgcttccccggattcccctccagtaccttaactgccgtaggctttggttttcttccactctgcgccaccgaccgcacctccttcccgcctatgcacaccttttagggtaaatgaaaagagcctccgaagaaggccctttcatctagtccagctgtaacctgttatattttcttgctttccgtttcagatttcgcttccatctgcgtatcgttaccgccttcctgtggtttctggaaaatgtatagtcatccagcacatatttcccatggtgttcccgttccccgtatgcacgcatccacttcatcctttctctagggcagggagactttcccgcctacccgcccggttttctcatttgcttaagtaatattccttcgcccgtttcaggcaccattccatcgccctgccgccgtccttaaatttctgctctgctttttcgcagaaatttaagcggcattcttcaatcccaaccccagcttcctccggtgtttccacaaattcgtaaatctgtgccgtaaattcttccctgtaagcgttgtccgtcaccagcaccagcggcccgtattgcaaaaccgccccgtttgttacggaatccatcatgctgagctgctccatcgtggtaaaatcctgtgtgttcatcataaaaaatgtcctcctcttctttttgtcatagtgtgcggaaaagctgtcaatggcaggttttccgttggtagtgacatgttacctctgagtgcggacattatccagttaatcaggagccataaatccaccaatcttcaaccgtagtgtttgtgcattctaccgcatttttcaaaatggacagaaggaaaaggccggcttcctccggtccttttcctctgtccgttttccagaattccctatgcgaattcaatcgtcagcatccccttgcttccaaggaaatagctgttttggatgtttgggtcttcaaaaaatgtctccttcgcttccttaatcatttctttcagccgttcttcccctaccaattctttcactgccttgcgtgtggttttcttgccatccagataaaaatttgttctcatgtgcatttcctccctgtggttttgttttccgaagggttttccctttcggtagtacacatgttacctctgaaagcatacattatccagtcaatccggcatcataaatctaccaaagaattccgaagggattcgtctgttttatggtgttccgaagatttcctgctaagtgaaatccaccatacgcaaggtacggcacacccttttataagccccgtgttgaagggcatcattcccctgatgcctgactttccgattcagtgttttcctgttcagggaaagaccccttttcagctctcccctcatgctgtccaggccgtgtcctctgtaccagcagttccgtttttcactggcattccccgataatctttcctgtaccattcaatctcctctcccattttctccaatgatttcatatgcctttgtcagtatacccataggaaaaccgtatttcctgtatgcccgttccagaacaccataatatctctcacttggcttcccatattcccggctttcatccataatgtaagccatgacagtttccctttgcccatccagatcaatctccagatcttttttgtaatagaacaccgggtatccctcatagcggtcaaggttcttttcatcctctttcccgattttccagaccaggactggcacccggctaccttcctccggctctatcgtagcgtatgcaccggttttagagcctttgaacagaaggcggtaatccttcagttctgttttacccaaaagccgcgccgtggggcagcggtatgccatctgtccctcatccatgttgctgccgtaagcaatgtagtatttttccatcttgtatcttcctttccaatttgtagtgaggccttcctcctaccaccccaagggcggtccgtgccgccctttgtgaaaaaggtatgtaatctatgccccgtgcctccatgccgaatttccttccaggtttttgaggaaatgcaggcggcaggttttgaattcgtccccgatcagacccagccggagcatccagcaccggaaagcatatttttcgttgtccgtctctgtcctgcgggaggaagcttttttctgcaccagcgcctgatgggtgaccgccaggcagaactggatataggcttttatctccccggcatggagggtactgttgaaaagccggaattccacggttcctttggtgaaggtagcatgaagattcagcccatggtagcgtgtcctgttgtaatgctggttccgttcgctgccgggctcctgcgcataccagatatccttgagctgttccattgtctttggctttttccggttaatggttgtaatcagctcttcgttcacctttttgcagtaccaaagcctgtccgggtcaatccgcagggctttgtagaggatatcctccttgcttgccatgatgtttacgatattccgcagagtctgaggggtaaaaagggaggcatccacatggatatggattccgcatttctcattgaccagggctttcctgtgccggagctgccggataatttcctgcaaatccggtatatcatcgtaggtgagaatggggctgacaatctcgcatttataagtgtcatccgccgcctggattcttccccgcactttcttctgtgcggtgatgctggaatcgtaggttgctttccattcccggccttttgtgtccttcgccccataggttttgtagtaggttccaatgtagtagctctctgtcccgaaatgtccggcaatcaccgctgccgcctgttccctcgtaatcccggtcatctctatctcaatcccgaatctctgtgttctcatatattcctgcgcctcctgtgctttcttcgttttcttttggtagtctattaatcactctaaaagcacatattatccagtcatttcggcgcataatgtacacaaagatttcggaaaaatccgcccgtcaatcgtgtgtttttacgggttccttctatggcatataataaggcagaaaacactgtgtctaagctgcttctgtcggtttcggcttctccccgctgccacccgtttcctccaaaaccaactctgccacggtttccccggctccggcagtttctccgccgccttccccctcctgggcttcctgttccgccaatttcttcgtctctgctctctgctttgtccgcaccttcgcccggtcaatgtctgcctgtgtacggaaagcggaatgccccttcaggttttccatcagggtattgcggctgtctttcatatccttaccgccaaagccgattctaaggagccagatgcgcatatagtatttttcattttcctcaatgcgctcctccggatcaatcctcttctgctccctggcctgcttcatcatggcagtggctaaatccgtccaagcctttgcctttaccgcatcctccgtgtaaggaaagcggaaagtaatcttttcttctgaaatcccaagccctctcatatcctctacatagttaagaagtgaatctctaaccgcctccatggtttcgtttccatttccttccaatttctccaccaaactgtccgggatgcaaaaggtcttttccccaattgactggttaatcaggtactgcctgctgtggatgaggaaaatgaggtttttcagatttaaagccgtcagcccttccgctggaaaagaaacgagaaatttaccctcgtccgtttccggtgcgtccacaaatcccctctccaccaatcctgtcaggagcatctccgctgttttttcatcttccgtctccacagttcctgcccggtcaatgatgcagtttcccacctggaagttacaggatgggactccgaggtactttgagggcgtgttcagaatctctgcggctgccttcacaacatctttcctgttctctgcgttcgtcttaatcttcatatggcttttcctccgttctttttgagccttgttttttggtactacattaatcactctgaacgggtgtaaagtcaaggcaatccggcatttttctgccgtttttttcatcctctctgcggaaccgttcttccagttcaaacatatttctttctggccggaaagcccttctgctgtcctcctgccactgcagcatcaccctccagaaatcaggatattcccaccggatacgccgcagagaatcaagacattgtttcgggcagaaccagcagccaaggcgccggaatttccggtacagcggattcagaagccccctttcttccaaatacgcccttgccatttcctcggtaatcccccattccgcaagcggcgccctcgtgtactcatccatttttgccagacgtttcggttcatcggcagcaattccaagatatgtgatgtgttcacctgcgcctttctgatactggcggagcggttttaacttaagccggtcattacaccaggaaaaccctgtagtaaatggaaaaccataaatctgccctgcacgctctcctcttttatactctgcgtagaactgctcctcgaaggaaagcgccgcctggacaaaagttatttttctcccgatgtgtttttcaatctttttgatgtatgcatacatctccgggaaatcccctcccagataaggcgtcgccataacattacagtaaataatctcgtcaataggcatccccttttctatcatcataagaagcatggcggtgctgtccttgccgcctgaaaatgataccacatgtctcatagttctctgtcatataaacctagagcctaccctttccctttaaaagcatccgtctatattctccttccccttttaaatttcatttcttgattccggcagcgccatcgccaccgcataagccacagttgccgtgactgcattccccgcctgcttgtaaagctgggcatcagaattgaccgtcctggcccgctcaaacaattcatctggaaagccctgcagcctgaaacattcacggggtgtcaatctgcggattctgccgcatttcattactgctcccatctgacatccggtatccagtgtctgagaacagcctttgccaacccggccacgacgtgtgttgctttttggataggcaagacagattccatcaccgggatgtgccaggtcgtatccctgctttgttccattgcggacaggaacttctaccccggcatcacattcgtcagtgctcctattacataagtacacaccgtgccggtcctgcccggtcagcgtgaacatcggctccccctcttccttcatccgtctgccattctgccgcttttccatcctgtcaggcgtgattactgcatgaacttccagcaccccggaattcgcagggcggttgaccacacccgcattatattttgcaatcaggcatctcgccaacggtgtgattttcggcttatcctttacctggtcgataaaatacagccccgtctttgcgcccatacctccgccatttgctccaagtgtcacagaaactccctccgggtcatatacccggtagccctgcattccacctataacttctttaagagttcttccgtcttctcctgagacaggtaatatttcccgtctgcctctgcttctaagatttgcgataaagaacaccctctctcggttctgggggactctgtggtctttggagttaagcacctgccatcttgcgtcataccccgcttcgtccatttcagacagaacggcggcaaaatcgaagcctccattaactgaaagcaggttcttaacgttctcaacaagtaggtatgtgggtttatcactttcttttttgcctttgacaaggtcaatgatgctgtaatagattccacttcgtttgccggacaatcccctctgctttccagcgatggagatatcctggcaggggaatccaaatgtccagatatctgcatatgggatatcctccggtctgagttctgtgatatcatctgctttccactccccttccgtgtcatacatggcttcataggaagcccttgcatatttgtcatattcacaataaccgatgcacttatgcccggcagcctccagccccagccggaacccaccgatacctgaacataaatcaaggaaggtcaactgcttcatcggcggcaccttccttttttaactctgaatatcttattttctctccaccccggatgacagacacatcctctgcggaacctttctgttccatatatctctgaacaatcacgtccacgaatttctcgtccagttctgccatatagcaaatacggctggtctgctcacatgcaatcagtgtggagccggaaccaccgaatggatccagcacaatgcagttgctcatacaggaattctggatgggatatgccaccagtcccactggcttcatggttggatgatctttggactgcttcggacggtcaaactcccaaatggtagtctgtttccggtccgaataccaattgtgcttcccacctttcttccagccaaacagcaccggctcatgctgccactggtagggacttcttcccagcacgaggctctgtttcttccagatacagcagccggagagatagaatccggcatcatggaatgctttgcggaaattcagcccctccgtgtcagcgtggaacacataaatggaagcatccggctccatgctctgctccatatttacaaaagctgcaaaaaggaactgataaaactttccatcctccatatggtcattctggatatttccggcagttccctcataattcacgttataaggcggatctgtcactacaaggtttgctttctgcccttccatcaacacctcgtatgtttccggcaaagtggaatccccacagattacccggtgcctgcctaacagccacacatctccctgctttgccaccgcaggcttctgaagctccgcctccacgtcaaaatcatcttccgtaattttcttatcgtacacggcattgaatagctgctcaatctccggcggctcaaagcctgtgaaagacacatcaaaatccgaagcctgcaaatccttaatcaaatccgccagcagttccttattccattcgcctgtgattttattcagggcgatgttcagcgccttttctttgttcttgtcgatatcaatgacgatacagtcaatttcctcatagcccaaatcggaaagcactgtcacccgctggtgaccgccgatgatggtcatgtcggaattgacaatcactggctccacatatccaaattcctggatggaattcttgattttctcatattccttatcaccgggtttcagctttttcctcggattataggaagccggaaccaagtccactatcctgattttcttaaactccatcctcgtccctccagaaccggtctttgatgtaacagttatggctgcaatacttctgttcccggcttccattgacttcaaattcttttttacagtaagcgcacatctctatatgggtgtgttttctctgtgccgcctccgggtgcagcttccaccatgctcgcctgcatttgtctgagcagaacctcctcggcctgccgttccccggctggctgatttcttttccgcagcaggcacaggcttttccgcacgccaagcgttcctgcatattgagtgccatagctcttgcatagccatccattccgtttgccttgcaaaaattccttacaatatcacgggacagcccaaccaccgtccctattgcccggtaaccctgcccccgcatccgcagttcctttatctgagctgcctgtgcatcggtcatcttttcacacctccaaatataaaaagccagaaaaccactcttttgaaatggtttcccagcttcaaaacacggaatttccggtactttttggcaaaacctttcctgccttattttgcggaaatactatgtttatgtatgaaaatgctccgggtttcctatcccccctgccgatttatgcgaaaattcacgtttgagggggcggcggtttccagggggcggggttccagagattcatatctcccctcccctcggcagatttccctgaatccagtcataacctgcacaatccacgggacaaatctttgtgcagttcatgcctccgaattgactggataattatccgaatccgatttaacatggcactaccaaaaccaaaggaggcaactgcttatgaaatcaaagaaaatgaaagtcctttacagcgcacgggcaaggcaggctcaatatgtctggggcagggaaagttactacactgccactcctaagatttccatggagggaaaatggctggaggctctcggcttccacatcggtgatgccattgaggtgtcctatgaggataactgcatccgcatcacacccgcaccgcagcctgccatggtctgtgaaccacaaacaccgtatggagaagcccccggcaaacgcaaggtaaaaaaataatgttcacatccaacgagcattctctcctggcctcgtcctattttaaactcgttcggaaaacggatgacttctacgaaatccagtcccggtgcaccggacattgctggattatccagaaaccatactcttatacaaaatatcccgtccgcatctaccacaaacactccaaaggtataccttattaccacatgcatggacaagcacacactgtccgctccgccatccggcagattcaaaaccacgaccagttccagttaaatggcaggcggcacgttactaccgcctagaggaaaagccctggggaactcccaaggcttctctctgtcagtatttgtactcctgataacggtcctccgtcatggtctttctgtcatggcagttcttacacagagcctgccagttctcttcgtcccagaacaatctgtcatccccacggtgcggcacaatatgatccaccacagttgccttcaccagtcttccctgttcccggcaccggacacatagcggatgtgctttcagaaacctgcttcttactgtacgccatcgtctgtcgtacccacgcccggcagaagatgtcctgtcaccgcaatgtaacgctccatgttcttcacaataaatcccgtccgtcagcttcgggcatcccggatggcggcagggcttctttggcttcatcggcattttatccatctcctctcctatgtaccggacagggtgaaaggatgaagcccctgtccacgcaaaggcaaaagaaaaaagccccatggattttccacagagcttcttacagttcttcgcagtttaaggataacacagattccaataaactttcaataaactctttgtctacacttagtctaccatctgtctaccgtccctaatccagcatatagttttccgtgttctgttctctcataccataaatcccttccaattcctcgattgcctttttcctatattttcctatcatagcatggctgacattgtatttactcatcaactcctgccagctcatctgccccagcaccatatcctttaatactttggactgtcttccgctcagcctgtttatggcatattcaaaaaactccacttcctcttttaccgatttgtaccgctcaatcagatagtcaaaccagtcatcatccagcctgtcttttacctgacggtaaatgatggctgtctttcctgtcttatcagaaattccactggtctgcactttgtctccttgtggacgggaaaagcacagactttctatcacgtcatcatatggcacgccctcaaagcggctgagttcaaattccagaatccccatatctcttttccatttatcataatccttaaacagtttttccacatccatccttccaacctccaattctcgctctcaccgcatccaccagcgccgactgcccgcagtccttcttctccaatgccgtcatcacccgttcatccagtgtttcctttgcaatcagatgatggatgaccaccgtttctttctgcccctgccgccacagtcttgcgttcatttgctgatacagttctaaagaccaggtcagtccgaaccagataagagtggatccaccgacctgcaggttcagcccgtatccggcagatgccggatggataaccgcaactgggacctccccggcattccacttctgaaaatcctctgtggcatccagttccaccgcaccaaatctctcacggattcttgtcaggtcatgcttataccaatagacaaccagcacaggcttcccatttgccgcctccaccaaatcctccaatgcttccagcttccggtcatggatatgcttcacattcccgttctcatcgtagactgcaccattcgccatctgcatcagcttgttagacaacccagcggcgtttaccgcatcaatatcaccatcctcaaaaggaatcagcatatcccgttccaactgctgatacagccttctctctttttcattcatgataacttccacccggttatagatacattccggcatttccagataatccgccgccctcatgctgatacaaatgtcagaaatcaactcataaattgcttcctccgctccctctctcggcttgtaggaataaaccatctccctgcttcgcttgcccggcacaaaaaaccgttcccggtaaccgccgataaaccgcccaagcctctgccccatatccaaaatcccaatctccgcccacaggtcaatcaagccattgggagccggagttcccgtcagccccacaatccttcttaccatcggccggattcttttcagtgctttaaacctcttcgccctgtgtgatttaaaagaagacaattcatcaatcaccaccatgtcaaaatcccaccggtaatgccccgccagccactccacgttctcccggttaataacatacacgtctgccctccggttcagtgccgtcatcctttccctctccaaaccaagaaccgctgacatctcaatcccttttaaatgttcccacttccgaagctccacaggccaggtatcccgcgccacccggagcggtgcaatcacaagaaccttcctgacctcaaagtagtccagaatcagttcccatatagcggtcagtgtgatcaccgtctttcccagaccgcaatccaaaaacaaagcgctgatactccgattcacaataaactccttcgcatactcctgatactcatgtggcacatatttcatccagcacacctccaatctgctccacgccgtctatcacataaaccggaaagcctaaactttccaactgcctcttccgtttttcctgtaaaactctcagcttctttcccggggccttcagctctacaaacgccatcttcttatccggcagcaggacgattctgtccggcaccccattcaatccgggagaaacgaacttcaccgccatgcctcccatctttttcactgccatagcaagctgtctttcaatcatattttcccgcattccctatctcctgccgttcataggagcctgtctgttttcaggacaagcggacaggacggacaatgttttcctatatacgcgcatacacatattacacaggcacaatcagcttcttttcttattttttaatcccaatatggatttcttgtccacttgtccaaaactcctgcttttgcttatatttcctagcggacagcctatcgggacacctctgtactttgtcccgcttgtcctcaacttttccggtaacaccgctgtctgccataaaggggaaaagtgtccctctccgccttgtcccagccttcaatcttctgcatgataccactgatttcataggaatctatctttttcagggtagaagactcccgtccaaaacactcacaccagatttccatgttgcacactctggtgcgtttcacagttccttctctctgcgtctccccaaactcgctgccatttaagaaattcctgcggtcatagaggctcatagtattccaattttccggcagaagcttttcaagatacgtcctgaccagaccttcccggtcatcggtctccatggcctccgcctgttccgaagccgccattgccgccacctccccttctaagaacagcttttcgccacccttataaaccgccactgcctccgcccaaatctgtgttatctcctctgctgttatctgccagggtttctttctgccctgcccgtttacccgcaccggccagaacctccggttccctgttatatcccttaaaaacccactttccgtattcgtgcttcccacaatcacacactgcctcggatggctctccacattcaggccataactggcgcggtacttatcatccacacgggacagaaaagacttcacagtctccacatccgtcttcttcatccctgccaattcacccagttccagaatccagtacccctgtaacttctccggcccggacttatcccgcatatctgtcagcgtcaggctgtcggaaaaccatactcccgccagacttgcaaacagtgtggacttcccaatcccctgcgggccattcagtatcaatacactgtcaaacttcgttcccggctggtaaatccttgccaccgccgcagccatcgtcttacgcatgaccgcccttgtatattcggaatcctccgcccccagataatcagccagcaaagtgtctacccgctttatgccatcccattccggcagattctccaggtactccttcaccggatggtacgcccgctcggatgccacggcaagcagcgcatcctttgttttcgacggcgaataaacgccgtatcccttattcagatacactttcagggaagcaaagtcagaatcattccatcccggcttaatctgcttccacggcagatcttttcccgcatcaattccgtcccggtgaaggttgaacgcaatggattgtaactggccatcattccttatggctgttaccagattatccagggtatccttcaccctcccctgacggtccagctccagggcggactgccattccttttccggccggaactccgcctttgcagactcttcccgttccctggcaaactgcagcttcaccttcccatccttcaccgcaaactcgctcatcgccttaaaatacggcagcttcgcagcatccgcatcctctgatgccttcctatccagttccccgaatttatgaatcctaaccatgtcaaaagcattcatcagcttcccgcaggccgggtctgtggcatgatgggaataagtggtgctagaatataaatagtacaagttagacatggaaatttcttgacatacaagtataatagaaaacaaatggaggaatagacatggcaacacagtacacagaagaatttaagagagatgccgtaagatactggaaggaacatccggagcttgggattggaaaatgtgcaaaaaatcttggaatcagtaagagtgctctctctacgtggggaaaggcatatgaggaaaacgaaggaacagtacccaccagaggaagagggaattttgtaagcgatgaggcaaaggagattgcacgtctacgcaaagaactgagggatacacaggatgcccttgatatattaaaaaaagcaatcggcatactgggaaaatgacagaagctttgtttcttgaaactgcccagtatgaagggcagcttcaggagcagggagaacgccggctgaatgtctccggtgtgctgaaaatattaggcgtttcaagaagtagatatcttagctggaaaagaaggatgccttctgacagagaaaaaagaaaagcagctcttaaagaaagaatccttgccatatataatgattcgcatcagaactatggtgcgccaaagattacagaatgtttacggaaagaaggagaaaaaatatcggaaaaaaccgttggaaactatatgagagaacttggtataaaggcacaatatataaagccctatacagtaactacaatagattctgatttcagcagtaaattaaaaaatatattaaatgaaaagttcaatcctgagaaaccggatgcagtatggtgttcagacatcacatatatatggacttttgagggctttgtatatctgacaagcattatggatctgttctcccgaaagattatagcatgggtattaagtgataccctggaggcaaaatgggttatagaggcaataggaaaggcaaaagcagcaagagacgtggataatccccggattatgcatacagacagaggaattcagtatgtttgtagggattatgtggaagctacagaggggatgcagcgaagctactcaaagaaggcatatccatgggataatgcatgtatcgaatcatttcatgcattaataaaaagggagtggctcaaccgattcaaaatattcaattataatcatgcatacagattagtatttcagtatatagaaacattttataatacagtgagaattcatagccattgtggatatctttcaccaaatgagtatgaagagaagtatcatcgagaattggaacagatggagaaacaggcaggataaaatagcaggtgttactagaaaagttcacgtttaacttgtactttttcttgacatagcaccaaagcaaacttcccctcatacaccaccacacccgcctgggagtccgcggggatataatcaaaccttcccggcatggcgcttggctggtacacatccggcagaaagacggcaaccgcttcctcaatcccataggaccggcagaacgccccgaccacaccatccttagcaagcgggtccgcctgtttcttcatttccctctgcaccacggactgctgcctgctgctcaccggccactccgaagaatcccgccagtccttatacttttccagcaccgcatccgggttcaatatctccccttcaatgtcccggaacaaaaactccccgtccacagaggtagaaggccagtacatcagccttgacggttcataggtggtatcgtcaaacagctctatgccaatctcctccgccactttccttgccgctgccgtatactcatccggcgatactgttctggataatggaataatcagccggagcctgggactctccggcgtatgcttatgggtggaataaataagacagcggaaatcaaagaacatctctatctgctccgggatatccagcctggcgtaatccatatccagtgtcagggcagaccggaacaccacgcagtccttcttcctcctgccgcctttcagcttccccagcacaaagcctcccacgtccttgatgtcatcctgcttcgctttggacagcttccggtactgctccaccgtctccgaagtgcggattgtcatggaaacacgcccgataaattcctccagctccatctccctgccattccaccgcttctccatccgtgaattccctgttgagataaacagcttcatattcacctgcctcctattcctttttataaaaagcacattcatagccgtccgcccggagcggaagcccatctgcccactttggctgtaccgccatgaccgcacacatttcctccacagagccagtcccctccggcacctccgctataatctcatcgtggcagtgcatgacaatggaataacccttttcctccacccggagcatggcttccgccagcaaatccctggctgtcccctgcacgatattctccaccagtttcggaccgtaagtctctatccggccccatttcttgttctccgcaatcccctcataagtcagcccgttccttccaaacctgttcagcgccatcctgggcttcacataggacagtttccttccggacggcagctccacaaacagaatcccgctcttatattcaaagacgattctccccaccttcattttctttttctccatgaccgactttaccgccgccgcatccacatcccaccagaactgcgtgatatggggattggtactcctccaggcagataccagaggagccagttcctcttctggcagccccatatccaaagcacccatggaagccagtgcgcccacagaacctccgtagcccaaagccagttctgaaatcttccctttctgccggagcggggagcctttcgtcacttcctccatcggcacatggaacatggcagatgccgatgcctcatagattttttttccgtgggaagcaaacacctccagcctccacttctccccggccagccacgccagcaccctcgcttcaatggcagaaaaatccgccacgataaaacggcagcccggctttggaacaaaagcggtacggataagttcagacagcacatttggagtggaatcaaaaagcatttccacatcctcaaactttccaagctttacaaggctcctggcaagttccaaatcaggggtatggttctgtggcaggttctgcacctgcaccaacctcccggcccaccggcctgtcctattggctccataaaactgcaataagccatgcacccgcccgtctgaacagacagaccgctccatagcctcatacttcttcacggaagtcttcgccatgagaagccggagacttaaaagctcctgcacctccccgtctgattcctcaatcagcccggccactgccttttttgacaagctttctatctcgacaccgttctcccccagccatgactttatctgcgctacggaattgggattctccaacccggtcagttcatacgcccgctttgtaacgatatccttatagagcaggtcacaggataccgcctgcctcaccagtttcctatccatcaatactccccggtcattaattctctggtccaggcggtataattccatctcactttcaggaattggaaaatgctgcagcttcttccttatccccttctccacatcgacgtcccggatacaataggccttgaacagctcccatttctccggcgcatggcagggcaggttccgtgtcctcccgccgttggctttggtaggcttgcacggcatacagaaataccggattaaatccttcccttccttcatcttctgctgttccagcccaagcaccgcacctacatcctccaaagaacggggcagggcaagcatggcagcctgtaccgcgctgcaatgccaggactccgggggaagatatctcccaaaatgtttagaaagacaggtccgttcaaagttcgcattaaacgccgtcttcaccacagtctcatccaaaacagcttccaccacctcttccggcagttcctccccctgcgccagatctgccacctgcgtttccccaccgtcaaaagaataagcaaacagaagcacttcaaaagaagggctgtccgcataagcgtaaaccccgcactttatcaaatccacatcgctgtatgtctcaatatctatctctaaaatccttcccatggcaggactcctttcctctgcattttggataacgggcagcggtcacccgctgccctgctcccatcacccaaggaaatcctcctcatcctccactgcgtcaaaatcctcctccgcattactcctgccgcccagggattccccatcacgcagcttctggatattcccaagccctgccgcaatcccacggtttccgttattattaaacccatagaagttcacgctgatccttccatagcaccccgaatacacctctgactggtccaggatcggctgcacgttcttgtccaccacctggggagcctgcctgctgttggcattaaagaagtaactgtccgcataggcttcatcctccggcctgtcaatatccccatccctcaaaggcagtttcaggttcgccggaaccttcccgccccacttggaaacggaatccttctccgcctgctcaatggctttttttatcttcgccaccgtctccgtatctgacttcgggataatagccgacaccgaatacttcgggtctcccccattcaccgcattcggttcccagcagtgcagataagaaaatctgcatggtacgatcacttttgtcaggttcacattttcattgttcatggtcttgcttcctccttaaaatccgcctctgcggttgctgtgatgattgcctctctcttatccgattccgtcaccagtgtgatcttgccctggggcttatacaccagcttcccaagtacctccgtaaatttcttcttccccatcagcttctccatctccgtaattcccaccagagaacgcttataaatatccgtatacccggcagccctggctgcctccgccactttctcctcatccgtatacttccggttgctcctgccctccaccagcttgaagcctgtccactgcttcccgtgggtaattgcttcatccgtggcaaaggcatacacatccgccgcccacttcgccaggtcatccgccaccttcaaaacttccgcaatctccttatctgatagaagcgccggaggctggaactccatctgagccagtttcagatactcctccgccctttccctgcaggtatttttcgccttacagaaccggcaccaggagccgcactgaaactccccttcacccctgatggcaagctgcgccctgggtttcagttcctcctccacccacttcatcagcccttccacagaaatctcccaggtgctgaccgattccagtctcggctggtaaatcgtcatccgtaccgtgtcaatgtcataaatggcatcgaacagctccaatgccccaagaccgtacagcatcatctgtgggttccactcggcatccacggccacgccttttccatatttcaggtcaatcaccgtcagcgtcccatccgcaacaatcagcaaatccccggttccaaatccctccggcacataagccgaataatccagcctctgttcaatcagtaccaccgggtctttgcagttctgctttgccagctccacctgctccatggcataggaaacatacccgtccgtacattcctccatctcatcacactggtaatccgataccggacgtttggaacgccgtttcagcatccgcttcagcttatgctccgccaaagcatgggcggcggttccttcctccgcatacacactcccattatcagacggaaactgctcctccagccttgcggaaggcgtgcagttcagccaccgcctggaagaagatgcagataaaagcgcgtgcttccccatcacagcaccttcgcttccgcaagcagcgccggatagtcctcctgcttcaccgccgacagcttcgccacgccatatttccccagcagccccttgatttcattagacttcccctgctgtgacttctctgccagcaccgcacggatatcctccacagccactttctgttcctctattttcttatccgcctttactccggctgtgttcttatctgctatgcccatctctgttttgctctcctgcttcgtctccgcctttgcttcttccacagcctgtcctgccaactcccgcaggctctccgcaaccaaagcaaacccgtccgccatcttcaataattcccttcccatctaaaactcctccatttcttccagcttctcaatcagttcctcggagaacatggtacagagcagcaagtcctccccaatctcccttgcatcaaaatactttgccctaccgccgtactcccggcaggcttcttccatccgtttcttcttttccgcatctgtctcgttctcaaacacccatatctcatctacctgctttgccagccgggagattaaaagatgctccaccgccccgccaagctcatccgggaacattccgtggaagttcagataggcactgaccgggataacacccttatgcgccgcataacggcaatactcctgcgccctcgcccggtcattctcctcatttcctgtcaactttgtcacaaccaccgccagcttcataccccactgtctccttccgcaccttccttaaaccagatgtggatgccatgctccacagcaaaccgtatttcctgttccattccctcggtagcctccccgaacacccaaatctcgtcacagtcaagcaacagttccgttcccatggaaatcccgtctgcccgttctttcaggctgtcctcattcaaaaactgcggaaacagcagatggggagcaatgggaagatgtccttcctcataagccctccggcagtaccccgccgcttttgcgctgttcccttccacatccccatggaaagggctgcagataaatatctttttcctcatctcatttccaccctttcttggtctttcttttacctgccgcaatcgccacgccggattcatataccgccacatccttttcaatctgcatcagcttcagtgccaggcttttcgccacaatactgattgcctgcagaatgcctatcagctctgtcgtgttctgcattccacccatgcctcctttccggggaaattaaaatcttatccctctcactgtcgtaatgacacttttttagaatgtgacgatgggaaataaaaagtttttctaaaagttttcgacatacgcaaaaagattgtcgaatattcttatgcttatacatcaaatccttgttccacaaaatacctccgtaatttatccaataaccgctttttccttgaagacactgttgtcctgctttccatttttaattttgcatactcactaacctgcatttcccctccaagcactttctctgcaagttcccgttcttccggcatcaagttgtccagcgcttcctttagaacttccagcattgctttcttctctatcatttcctccaggctctccgaaaaaagctctgtccgcatatcattctctttccattcctcataagactccgtcctgtatccctgtgcctccatagcctcccggttcctctgttccttctttttctgctgccaccatggccggtaaaacctctggtattcctcctccgtaacctccatctggatttcttccctgccagatttgatagtaatctttcttttttgcattcagcattcctctctttaccttgcggtaaagccagaaaaactgactgccatctttcaaagcgcaaaaaaagaccgcaggaatccattggtcggatttcctacggtctgaaattttatgactatcacatggggcatgccccggtggatgttttattcgctttttaaaagtgcctgctattacatagcacatatattctatatttatcataattgtcttttgggtaactgccatctcataaaaaatatttattttgaataaacacctttgattttcaggcattgtctctctcctttccggcagtaccgcacatattcatagaatgcctatggttttctatggctcgttgcatgagcctatttaccataaacttccatgtatatgaagtattcccttccaggtaaaacttatattaatttgtctgtggtcaaagtaataaaaaagaaacaattcaaataatctgactgtttcttttccttcctgttattcaataattcctttttctcttaactccctgctggccgtctcctcgtcttcataaaccctgtcatatctgctttttattttcccgaccttgatatcttccatcaaatcattgagaaaacttttaaaattcccgttatcatccaccagccggtttatcgtatcccagtcaagggaatccttctccttcgctgaaaagagtatctcactctgcataaagtgttcagcgtccagccggattaccccaatgccaaaggcattattcagcctccgcaactcatccatcagttccggttcctccgatatatgcagcgcagccaggtatccctcatgcgcccagcttgaatttgatactgcctggaaatagcattcccgcaggttggacaaactcagactaatcttcatctcaaaggaatacagtttatatggattgaccttcagcacatcgaacagcttcagtgtattatccgtataagaatcaaacggaaaatgaacccctacgatatcgggatgcagccatctgttcttaccgcttttctccctcttggaaacttcgtgataaatggtttttgtcatgcatttaaaatgctcatctgcacagacaaagctggacagaagaatatgtaaatcccgttcatgaaacctgatcgtctccctgctgccatccggctcacgaatttcctccaggtctgacgtgaatttttttcctttcagataaaattttgctggccttttactaacctgcgtaaatttcgactctggattattttttaaatcaacgtaaatcctggccgataacgtgcggacaggtgtctttccggaggaagccagcctttcatcaagcccctgtttacatcctgcctcccacatctcctctacggataatggcctgtccgaagcctctaatacctcttttgcaaaatcaataaatccatatgtcatactaatttctcctttgcgttttgtatggatgaaatatgccggggaactcccgaacgatgtgatttaagaactttgatgtcagatagaaatagtttaaatgatggacaagtattttacaagagtcatttcttcgttttggggaatcttttggatatgaaagaagcgcctggtcattgttttgccacggaatataccttttgccagatagtaagggttttgccggattgtatcttttgtccagcaaaaccttaatttttgaactatctggcgttatccccgtccccctatctgcggaaacttatccatctcaccttccctaaaaacacaactccatttcccgctaataatcctgcaaacccgcctggaatcaaggtttccgcaccagcaacgccacagtctccacatgcacacttttccgtgagctttttgtggtttcaactatataatacttcttcattccatattttcctttaaaatcaacggtttaaaagatacaaataatctggattaattataacataatctgcttgactacacaataatttacccaaggtaggcaagatgtagacattgcctaccaaatatcccacagccagtctctccaatcaggggctggctgtattttatgccctggatatgtaatccttagcgacgtatcccttatgcaatccggcgatcttaaccagccaccagtcccccgactccccgatcacgtccactaagttgccccactccaggtatggataccccggtatattgccatatccggtaccagggccggtccgcacattaagtagatcagccgttacccagcctacccacacactgtaggtggtgctggatgtggtctgtgtcacaaatgcagggtagcccttggccttgatctggcctagcagcttgtcagcgttagatttgaccgtaaaagccccgacctgtaccttatagtacaggttagcccttatcacaaatgcgtcaaagccctgggatttaaggtcatcacgcaacttgtcggcattggccttgttggtaaaggcgccgcactgcaccttgtaatacacggctcccggctgggtgatcaccggagagtccacctgatctggctgccgtccggtcatggcggctttgatgtctgccctaaacttgtccatcgtaagaccaaacctatcccagacatgcgttgggtccacgtgagctgtgctaagaccggctctgcggccctcatcgtggctggagaccgtatagagaccggatggcagctttgccttgggatcccaaccgtatcggtcacacacctgcgcaaatagctgtacggccgtgttgtatcctctcttgatgtcctgctcaaacttggtccaattgttaactgtatagttggccccgccggtgtactcgatgtgatccgactcgcacacctccacggagatcagatggtcgttgccatatccgccgtccgcccagctacgccagatatccggcagggtctggagcacgtggcctgatacgtcagcgtccacgatgtaatgcaccccggccatgtatccggactggttcatggcggaccggacactctgggcggtcccctgagcgcatccgatcgtgtgtagctgcatcccgatcttggtgcaggacatacccgccaggtaacaggggttgttggtcatgatggcttgttcgatgtttaatttcatactttttcctccatataaaaaggagggcctactcgccctccgggttgtctgtcttttcaatatccaccttatcctccgcctggctcttgatgtgctccactagcggatgaaggaatcctggtatcttaatccctatatccttaaggttttcaaggatgctgataatctcattgcagattatccaaattgccacgatacaggccaccaaaaatgtgaatggcagtgtgagcccgatggtgtcagatgcatataagataagctggtcgataattgctcccaccactaccagcagccacatgcaaacctttttgataatgcctcgaatacttttataagagttgatatcctctgaacggtacttggatgccgccagacctgttatgtaatctatcacattactggccaccattaagatgattggaagagtgagcatgccaaagattgaggacaaaaatgcaaatatcgctgtaaatgctgttttgataatattgttattcatagcttttcctttctgccgttgcgccggcgcaaatgtaaaaaaataagacctttaaggtctcgctctgatttccatttgtgattaccctttatgccccttctttccttctgaccactatctctttagcatacacatagtattcatatgattttaaatcagactggtcctccttgtcatcgttatagcccatctttccatatgcaaatacagatatccccgctttaacagacatcgatttatcgttggtcgggatagtggcttcaaatgtgtaactaaccagcccatttgatggtatatcgatcattccggaccatgttcctgggcttctgccataaataaaattcccgagtatcttgtatgactccgagaggagttccatgtttacttttgcgtttattgttataacggcagaatccccttcgtatacggtataatcggatggagatatgatggtaacaacctcttctgggctaaaatctgtcctccagggaaacttgatgtccttgtaaaatgggagccccacgcagccatcatagcactggttgcaataagcatcagggaatctctcccagagttttggggccgatcctaatttaccgcatccgttaaagcattctgtaaaattcttgactgccttctgccttgaaaacaggtcatccggcagggaagttagattcacattgtttcggaacgagtttgcgaatgacgtagtattcggaacatcataaaatatatcgggcgcaacataggtgagaaatctgcattcatcgaacattccttgtcctgcctgcccattctcctcatccaatatgcctggtatcttggtcaatgccttagtaactcccgggatctggctcattttataatctccaaaatagatcattttaaaggggccgggagggtcaacttctgtgatcgtaatcacgcagacataggttcctgtattcttatgtacaaaggatcccccggaataaatttcttccgtttgaccgtctccaaagtcaatagtgccgctaaaaccttccagatttatcggaaggtagtttgtgtattcgaatctgataactcctgtttgctccgatactttttcccagatcaagcggtctcctttgtagatacgcctgatctcatgtcctccggcataaacactgtctatttttttcgtcccgttatataaggcataccgcatatcattcctcccatgtaaagtaaaagtttcctgactttttcccagcggagttatacatctgctggctcatgatattcatggcttcgacagctccaacctcaacagtaatctctgtgcttgctccactaccatcgaacagcttccattttggcaaggtctttttaatctttcctatgtctgcggtattattctgagtatcctttttcttgccccatgctggagaattataaggagcattcctagcgctgtaggtgtcccggaatccattaaaacccgtcatccgcctggtcatgatatatgagtttatggtccaggttagctcacggccgtctggcaggcgccgggttacgtcaaactgaatattggtgccgatcttacggtacgggttgcctttaacctggcaggtatactccctggccaggtacctgtgagaataatcatcctgctcaaagtgcggccccaggacaattggcccgcccagctcataggtggtagtcccccatccactggctggatcgtaggtggttttctccttgtacacctgggatatccagtcataatctccaaccaagggagagttgtcaataaaatatacattgtcctcataagctttcaggtccgggatttctactccaacgtccaccggataatacggatccgggttaagcgcaaagcggtaaggataccagatacgcccctccttaaacttgaccggttttatgatccccgtcaatatctcctctggagtgtaatagttatgcttgccgttttgccagtaagcattcggcggcagcttgatatactcaaagactccatcctggttgatccatccccataccatgttgttgacacagatatcctttaatagctgcagggccgtgagcttagtgtaatccagattgttagggatcagtgcggcgtcatacatcagtgtggtctgcacctcgtcaatgccaagatattttagcagctccttgcggagtaatccaactcccggagagtatttggagacataggccccaaactcggtgagattgacgttgcccttgcttttaagctcatcgtaggcaacaatgcgtctgatatttaggctgtccgtccgatcggcactgtcaattatcccggtaaagatcctgacctcctcctggcctgcttgcagatagacctgtatcttgccatccgggtaggtgtcgggatccaaaaactgctccgaaaaaatattgacctcaaaccggctggagatgcatccgccaaacctaaagctgctgtcattgcatatggactgctccagtacaaagctgtccagttttatctcctctcccgtaacgtcagtgtatggccggtccagccagtggatacgcatacttttaggggtggcatctgactcaaatgggttatcgccgtactttgtcaccgtaacagtaaaggaggtctccagtatatcagcaacctttccctcgactgccgggggagtatatgccacgttaatggtcttgatccccaccgtatcgccgtcatatccactcaggacatagtctgtaatggcctctgttttgccgctgttgtagataagactgacctccaggcctgtactgtcaaaagcctctccaacggcatacaggcgcttgtccgggtaacgggtgatcactatgccagtcggcaggattgtgccgacaaacacgtaaaactgtgcagtctggccctggtaagtgaccgtgacggcctgctggccggttatgttactgtcgtagccgcttatggtgtagtctgtcaccacacattgggccccggtatcgtaagtagccgtgactgtcatgccggctgtgtccagcgcctcccctttgacgtactcggttttggtaggctgggaggttatggcaatggactgcagtgtttcgaacgggacaaaaggtctgttatatttttgagcaaaagcatgtgccgttgagttaatatatccgtgtattacaacaaaatcatctatgttcccttcccaatcgtaaatcttgcaatcaggattatacatatatagatctgacgggttgctcatcccgctcacatttttaagcacctggaaatcttttcccaggattactttatcgatatgacagcgggggccaaagccttctatcgacttccccgctggtatattgatttccgggattgacagattttcgaacggctgcatgataaccaaatcttttgaatccggattaaaaacaacatttgtcaactttgtcgtgcccacaaaagcgtacgaaaattcctgcaaacttccgggaaggataatttccgtaatttctgtgctttggaaaacccctcccactatcgtttttaatccctcatgcaaaattatacttttcagattatggcaattcggaaatgttgtctgcagagcttctacggatccaggaatttctattgtttctaggcttgtgcattcgttaaatgcaaagttactgattgctgttacgctgtcaggaatttgcacatctacaagattgtgaaatttagcaaatgtagaaacacctatgcttgtgactccatgatttattatcgccttagttatactttcctgatactttgcaaacatgagagcatcgtcagaaaaatcttttatttttccgattccggatattgtcaaaaggccggtttgcaaatctaaaactgcttctacatcctctaaggttggtgttcctatatattctttaacagtttctttatcaagcggtacaaaggtacggttatatttcttggcataggcttccgctgtggagcctgtgtatccataaatagttgccgtttcattgactgtaccttcattactgtctagaaattccatatccctattatagactataattgtttttagattaggattattataaaaaggagcgtacctgattattttaactccagctcccaatgttactttttccaatcctccggcacttccaaacgcagaatccgttatcatatccgcattcggaatgtatatttccttcagcatgggagtattaaaaaatgacgatccccctgacatttccttgagcgtttcgggaaaatttatctgctccaatttaatgcagtttgagaaagcccccgccgttatgcgttcaagtccctcgtttaatgtaacttttctcagagattcgcatgtgttaaacgcataactgatctccttgacccctccaggtatctctacttcttccagtccactgtaagtaaaacagtgatataacgtgccggaaatggtagaggggagctttatttttttcataccaaaatatgcttgaaatgcatattctgtaatatttgtgaccccttcttcaataacgcattctttgacctgttttctatatgaacccaatatagtgcttaaatctgcctcgcttcctcccggcatcatattcccatgcccagagataacaagcagtcctgttgccagatccagactggccgttacatctttcggattcgggtatccaatatcttcagatactgtatcaagtattgttactgtaaatattgcagtttttgtaacttcgtgctcactatacgatattgtgactgtttttgtgccggctgtcgagctgtcaaagccagatagggtataatcagtgacctcggctgatgtcccgtcctcataatttgctgttaccacaagcccagtagtgtcaagctcctctccgggcttatatactgttttattaggctgcgtggtgacggaaatagacagcagcgcaaccttgagccatgtgaccacggcattgctggcttcccacggggctccgggtattgatccggcataattgtctattgttatatcctttaaattcttgcagtagataaacgcctctgtccctatgcttgtgacgctttccgggatgttaatcttgctcaaactcgagcagttgcagaaagcctctgcccctatgcttgttaccgtatctgggattatgatgctctccataaaattaaacccgaataaagtattttttccgatactggtgattcctgatcgtagtgtggctttaatcacgtaccccgtgttcatagacatgttactgggtggaacaaaatccatgattgcccccttgccagatatggtgagctccccggtgatgaggtctaatacttccacgacatcctcaggattcggcgaaccgatataccgcgttatttttggctcatccaggtattcgaacggaatgctatagctgcctgcatatgatctggccgtagaatccgcatatcccctaatctttgcgacttgtaaggttccgggttcaggattgatgtcgcactctgggttttctatggtaagcacaagattcgggcagttataaaaacactggcttccaatttctgcaagattttttccgagggtaagctctgtcaggccagtgcatccataaaagcagccgcttccgatttttgcaagatttttcccaagtgttaattctgtcaggccagtgcatctgtaaaaacatcccattgtgctatattcgtccatcaactcaacaagactgtccggcagtgtgacctttttcaggcttgcgaacttatcatagtaattcgcaaagatattaccgatttttgttatcccttcctctacgatgatctccttgactttttccgtgtagctgtaaaggagctcatttccctgtacataagtaaagtaacgtgtggcacccgtcccgcttatcacaagccgttctccggtctccagatcaatttccgcctttacatcttgtgcgtttgggctgccgatatactcaatcgccttgttcaggacttcaatctggaattccgccgttttgtcttgataggtgactgtaactgtgcaaaatccaggtgtcctccgatcttcaggccaggttattttaaaatcttttactgcctcttttctcccatcgctccaactagcggttatttcaatcccattactggaccacatcattgcatttatttcatactttgtcttgtttggcagacgtgtaacctcaatgcctgtcagagtggcttctgccgcctccgctaccgtgacctcaaagctcaccgccttcccctggtacgtcaccgtcacagttttagtcccagccgtggagctatcaaaccccgccaccgtatatcctgtcacaacatcggtcacattgtccgtgtatgtggccgtaactaccatcccggtaaggtccagctcatcgccaacgttatactgcacttttgttggaggcgtggtgactgcaatggataacaaggtgtaaaccgtcactgtaaatgcggctgtatgtccctgataggtcactgtaatggtcttttgtccgatggtcgagctgtcaaaaccagatagggtataatcagtcaccgcctgtgtactgccatccgacagatcagctgttacctccagcccggcagtgtccaacgactccccaacctcgtaccttaccttatcaggattgtgtgtgatttggatcccggtaacctctgggccggcctctccctccacttggtacagatcaatcaaggtaggtttgactgtatttgctgttgtaggagtcatactcccggtcttttgcgtactaatcgcctggcactcgccaaatacaaaccggtaatattgatactctttggcgcaggtgatctctatttttttagcatccgcccagtcgtatttattgacagatgcatcccagcttgtaaactgtgtccactccaaatccctatacgcctggatatcctcaaaggccaccccgtccacactgccctgtaccacgaagtttttaggcacctggcctgcatccttggcgcttacagttgtcctgcaggcgatccggaaggcccatatgcggatggctgcatctgatttgatctgcacccactgctgggcatcatcagccaatccagtaaaagtaatatcatcatccaggctctccgaaaacgccctgtatgcgccccagttattttgggatgatgtagccgcaaatggtgcgggggcgctgtttgctgtcatgtaagggccataccgtgtgtcgtgtttaatctgtgccatgtctaccgcctcctgtaaaaagcgcacaagctgtgacacctgtgcgccttgggttaatattcctctaactctatgtgtattgcatcatataccgggcctgagtcccacacatccagtataatatactcgatgtcactcatgtgcatctccgtggtgatgtatgccccggtttctggattccaaaattgcacctggtaacgctgctccatctcattgatcaagccggacttaaaagcctcctggatcttgccgagcattgactgctccaggtagctctcggtctcaacgataaccttggcttttggtacggcatccatctcccagtggttaccgccatatacgtccttatactttgccagcagattacgctgggtaggtacacactggtagctgctctccaccagacactccataggcagctcgatttccccaaactttatcagccagcctctaaatgccataagtcctcacctcctagtcatccagtatccctactccgccgttcatgttccgccattcttggttcctgtccctgaaccaggtcaagactttctgcccatccacttccagaacgatatattcaggtgtcttccctgcctgctgtttcaaagaggaaagcccgctcagcagtttttcaatcttttcattctgtccgccagaaaatctgagtctctcggatccagacgttccagtcatgaagctggaccgcctcgtaacgttcatctgcatttctccgactatctttccagcgttgactttctgcatggccgctgtggctttctttgccgcatccgtcgcctgatcatccaggtgatctgattccatttcaattcccaccccgataccggcgatcatattcttgccaatcaagtcgcgcataagccgtgacggcgaattaatcccgaagaaattacagaaggcctgcttgatggcgctgccagcttttttcacggaattccacacggcattacccacatttgtaagcccggacaggatgccgtttataatgtcagatccaagctgcagccagtctatgccaataatggtatcccaaatcgaatttatgatatcccacgccgctgagaccagatcggaaagattggtaacaataccgcttatcaggctcgacagtattctaagccccatgtccacgattttagggagattctcaactaatgcggtacatagatttccaataatgaccggagcctgctctattagttgtgggattgcatcaataataccttctgccagggattccagcagctcaatgccagaatcaatgatattgctcagatttttaggatccgtgagagattttgccagggtcagaactgcctgggccgccataggtatcagctttggcagtgtcttggcaacgccactcaccagactggtcagcagattcaccccggactgcacaatctgaggcaggttgtttgtgatagatgtgataaggttcgtaattattgactgggcgactggcagaagctgaggtattgcagtcgtgatcccgtcaatcagccattgtaggagctcagtaccttttgctacaatattgggcagttcttgagcaattcccgttccaatattctgtatcagttccaggccgacctgcaagagctgaggcagattatcccgcaaactctccaaaaactgggatgcggtcgttttagcggcgtccgctatttgcggcagctggctccccagtccgcttacaacacttgtgatcagctccaggccagcagtaaacaaggacccagagctggatattatgccgctggcaagagatccaatgatatttgcccctgacttacccagttttgctttatttttcacaagcccggccaggaacttatctaataattttacaccagcgtcaatcagctttggagccatctccgcaagctccgtgatgatatcggacagtgaggttcctaattgctccgcaagcccagaaaaacctttctccgcataagcgctggagatatcttctgcggcatccgcaagcaggcctgtaaaatccgcaattggacctttggtgtcctggtacatggatatcccaaggtttttaaaggagtttcctatcttctgtacatgtacctctgcggtattggacatcttctcataagcgtcatccagagccgttgtattggatgccatctcatccaacgtcttgttcataagtgcagagccctggtcggatgttagtgttaaaaccgtattcagggcttccacagagccgaacagtttagccatcttgtcagtatttccgccagtggccttcttcacatcgtccaaaaagccagccagccccttagactgcaaagcagctgtagaaaaatcaagtcccaactgttccgccatctcagcagcctcggaagatggcttaataacattggataatgccgccttaatacccgtcatcgcctcactggttccaacaccatttgctgtcaacgatgccacgccggacaacaactcatccacggatacgccagcggcatgggccgtaggagccacaccgccgatggagcttgctaattccccgaaagttgtcttgcctaaattctgggtcacaaggaacttattagcaagtccttctgcgtctgttgtctccatgccatatgcattgagcgcagacgtaagtccatctaccgccgtctccgtgtccgtaaaaccgccccttgctgcttttaccgctacgcctaccaaatcaaccgcattagccgtatcagcacccgcagaaatggcagaataaagcgcctcatttaaccccgcagcgccttccccagtgtcattggagagctttaaaatatcctggctaagctgctccatgcttacattcgaagtatcagcgattgtgctcacctttgcaaggcttgtctcatactcagtaccaaacttataggcggcagctcctgcgccagacacggcagtgaccattccgccaatagcggcagtggccgtcttcgccattgtagccgcagcgcttcccattgctgaaaagcctttctttgccagtcctcctacctggcttaacccgctcttcaatccagactgatcgaggagtgttcctatttttacagtgccatcatttgccaatagtctcacctccggcaagctatcggcactctggcactacttagcttttatctttatttcaaattccttcctgcagttccggcccttgcaccgcacggtaagtcccttgcattctgatttttcgtcaaaaaaaataggcatctcatatccgcagaaagggcatttcaccttcttacgcatctgatacctcccctgtccgctttcggacgtattctttcatttccatgttccgccttgccagcttcattcggctgtcagcagtaggattatcgtcaatagcatacagcttcttcatttcattgataaagatcctattctgcttactcatcccagaagtcgacgctgtgcggtaatacatgatttttgagaatttcagttcttcattcaatgcgataaacatggcatggaacttccaccagtgcagatcaaaattcttcgtgctgtttaaatcaatgctatactgagtcaaaaaagcggcatagatataagctgcatctgcattaaaatcgtaacaccgtttctggctgctgattttcacagctcttttagacttgttctcgtttttctgtttcttttcatctgcaccgccacgataaaaccactgcatctgtttgactgcatccggtaaattgtcgggtatgctacggttgtaaaatatgtttaacgcattcaatagcctttgttcttcgctttgcgactcgtcaaacatacagatctcaatgagtagaaaagctcggtatccccagtttacgggccattccacctcatcaattagcactgtctcagggaggctgtctatgaggatattcacttgattctgtctggggaatagggtacaagggtttcatctttttgcgtcttaacagcgtccaggaacgcatagtacatgttcatggcctcctcggcatcgtcacactcacctactacgtctgcccctgttgcatcaataaaaaaactgcggaacatatcaatgatactcctgataaccgcagtcagttttgtatctttcttgctttttgcatcattgattttcttctctgcttgccccatcttctgcagggcaagctccatcgcctctgcatcttttaggcggctgattttaaaatcaaactctatgttattaatcttcatccccgtttaccttcctttctcaggcgcctgactgcgccgcataggtgtactctacaggtgtatccccgatcttcttgaactcgacatcaatggcagaggattcaccggcgtttccggatccgtcactgttgatgatgaccgttaccttgcccttttcccctttgccgttcaagatattgtaataaatataatccgttacaacggcattcccccggccatacttcatagcatgggaaaggatataatcctgggcttcatcaccgatataacggtcaccactgactttaaaagatctttgagccccggtcctctgggtggactggccagcacgaatataggtcttatcctgcgtggttgggtttaactgtgcatccaagccctcaattcccatctgaactacagcgtaatcagcctcttttgttcctgctgtacccggcgtcaggttgatggcaaatacataatcatcattggttacccagccctcaaaatccgcattgggagtaactccctgcatcagctcgcttactttcatgctctgttcctcactttctttcaaaatagatcacccggcactgtaacatgtaccgggcaatcccattctccatatcaatatctgccaggttcggcatgttctggagcgtctccatcctctttacctggcatttctccccgaaatccgggaaatgtttcttttctccttgatcatccagccagtccatgaacgcctgggcaaagttcatagcttccaggttcagactgtccgcatcctgggaatatgactttgtgatcaggatggaaaagccatactctttctcagcccccacacggacgtagttcttacggaccttgtcggagtaattggtcaggaaggagatccggtcccaggaattaccggagaaattgaaatcgagcatactcccgaccagctccttcacttttggtccgaaatacgctgtcattgcatcatgcttggtcaacactatcccttctttcggataaaattttccgttgccttggccagatcgtccttgcgggccgccatcatagccttatcccaatgggatgtcggcatcggatgacggaatttgttatattcaaggtccctatccgtgactacctttttctctctatagcgggcccaggggctgtgggaatccacgcctatcatcacttttcccatgaactggaaacgtgcataaggagacatataatggaccactccatgtccatgctccgtgtatactctgacatttccagataacgaagccccggattctccatgcagcgaaggaacataaggtgtcattaagcgtttagcctcatttgcaaggaacaactgaacatcgttccttccaacggtctctttgtatatctgatctagagttttgttccattgaaaatcaaccttcatatcaacctcccgctctgtagtgtctgtcaaccggaaaatctgtattatcagaaaacgatgtgacccggaaagcattaggctggtatttgtgcaggatttctgttgccgtgttcttcccagtccccgtgatatcatccggcacttcacccttcaaaatgatatccccctcacgaatcagcaccgggttttcctgttccggtatccggaccacatacacattttgagagtataggttcgtagttgtcatggtatttgctcctggcgcaaccacagtgcgtacgtggaaaaagcagtcgtgatatactttccggtcccacatatccctgccgtctgcatccctagacttactgtataccgtaatagtctgattgtcatttgggttcatcgactcaccccctggaagagcagcccggtatcctcaaagtaacggcggatgataccatatacctttctctgatgcccctgtttggtataatccgtcaggtcaaactgtccagtccggccatcgttgccataggaaatcagcggggcgctcgtcccacccgtcacctgctcatagcggtaaatggcctcggcaacctcacagcagcataggccagccagttccgggaaatcttctatcccttcttggatgtatcggtccatttcctgggatgcagctctcatataataggcagttccctcctgtatcaatggttttcgtcccagcagatatgtgatcagataaaattcattgtccgcatagaccatatctatcccttcttttctggctttggctcctctttgggagccgttcccttcttttctggctttgctctctctttaggtaccaatcccacagtcctcatagcgcaccctccttaagccttgtggctcagatagataccagccaccttgttcttatacacatccacaatgccgtatttacggtacttggagatataagcatcggagttcgggttattggccggagcgatgatgtcagacgcgacatgcttatcaaacttgataattgccggcttgtggatgatcataaagttgatatccttgccggcagtcgctttcttataatgtcccagttcctcaccctcggtcttgccgtccaacaggtcgatggcggtgtaaaaacggctctgcgggacttttttctttaccgcaaaggcattcagcacctcgcgggacttcgtggtatccagggccatgacgctgttcagcagggtaggtgttgcatagaggtaacgcccctcttccggcacctcgtcctcatccatgatgttctttgcttccaggagggctgccaggaactccgatgcatccgcataagtagcagctgcagccttggagattccctccactccggccagggtggcgaaggtaaacgcgtctgcctccggagcaaccttctccctctgcagagtagccccggccataccgaaggcgatattgaaggtctcctggtcatccatcgtatccacagaaatcttggttccacggtcgtagttgaaggttgcggtcttccacacaacgctcacggcgccgtccgtatagccgctgttgcggtcataatctccaagtccggtcacatcgatctgtggataaaggatttcattggcgtttgctccggcgcgcatcatggaagcatcgcttatcaggtcagcggtcaccgaagcctgacggtagacctcatccagtaagttcgtataattctttgctaaagtaattgtattaggcatatcttgtacctacctttcttattctttatttgctgccgggagccccattgctgcccggagggttgctgtgtttgaatcaatgcctcctgacccgctgtttcccaatgggacagagttatttatcggctcatcagaaccaaataaataggcatccgattctttaattgcatccaatgccgccgctatatcctgtgactggttttttgagccttttaaagaatccatatccaaaatgcccatgatggccttttcattacgaccaccgcgcttctggatttctcctttcagaaggtcggcaaactgcatatctgcgatcttggcctggtattcggattccttggcagccaagtcgttggtgagtgtctgcacttttgtctgcaggtctttcacatctactccatcaaactccttcagggcagtctgcgtggtttccagttgccccttatagttatcccgttccagctctgccgcttgggtctttttctgctcggcggcgagttctgcttcatgttctttgatgaccgcggagatctgttcctctgtcaatcccaattcctttaatttttctgctttcaaccttttgttctcctttcttcgtacaaaaaaaataagacgcttcaccccgcgcctcaaagggagatgtatggatcacctcctaaaaatgggtataaaaataccaccagccatcatgaccagtggtattacatctcaacattttcaattttatccgcgatatcctctaatgctttgccattaaaaaatggggtttgcattacctcatcaatgcttttggcagtcatcacatcgtccccgcaccacatatcaaaactgtcaggtgtaaatgggtcaacaccacaacttttaccgccatagtcgaatagtacgtgcgatgccaaactgttaattctggctcttaaatccgctgctttcataaaatatcaccattttcctctctttcagcatccgtcaggtccctcacaggccgcccgatcagatttccgtctttatcgtagagatagtcgtgggcatgttcgcccttctttccatatgggtgcatttttgcatttccatgatcattgttactgatctgctttatctgcattccgtcatcaccataataattccggtctataccgccttttgcgttttctttctgcgtaatgctgtttggtctccctttcaaagtagttcttgatgccttaattatactctgccctgcagcatttttcaatgctggcgccatctttacactgcctaggccgtcctgatagacccggtctttctgctgcggcagcttcatggaccgggagaaccgcgcataatcatccatcgtgatacggtatcggctctgtgcggctaagagattatccttggaactttctcccacctccaagagcttgatgtcctgcctttgcttacgcatcaggcgctcaagtctccgttgctcctgcagggcctcataggtggtatactcttttccctggtaggacttcggttcgttttcctggcggttcatctcgttcagccaatcatccgtataagtccgtactgatacgcctggtatataagcatcataagaatgatagcagttgacgccgcaaagaccaccagcacttcccaggccacagacactatcaagctcacgcctatggtatacacggccctgccatacctgatgtgacggcctggaaccaccatgccaggacacctcaaagtattcagtatccaggtcttttgccagctgctcattgattttagcttgcacctgattatatccagtcatgatacacatccgggcagccacatccacccggtagctccggccggaattgtaatcaatggtacgcagaccgctgttggtcatggtctggacagtgcgccgcaggactgtgttgtaatcaaagcttcccgtgccgatgtccatcatggcggcgtccagtgtgtcctgataaaactccatcagaggcgattgcttaatcctcccatcaggcccccgtatagcaaagcccagggaaccagtgatattgcggaactccccctctgtctgtttctctacagaattcaaaaactcctgcagctccctgttcttttcaaaaggtatttgtttctttcccttttctttatagagatttcggttccgtatatattcattgtttaccgaatcatgataaagttttttaacctcagcttttgtaagagacaaactttcctgtatggcattttttatctccttcttgcttactcctagttgataaagcctgtttatttcccagtctgcagtggaagtgatctcgcggtttgttttcaggcgtcctaccaaatctgccattatcctgttttccaaagctgacatatgccgctgaaatggtagcgggatccgttctaattcgccctgtgacttcattcaatcaccccggcatcttccggcaggttcttctcagcctcttcgattgtttccccataccacttcgcccggtattctgccttggacatgacccccatgctgacgtcctgccggtcctgctgacgctccgtctcctcgtctactaaaatggagtctttgaacgtgcagataaactcatacccagacttggtgagcccattataaaaagccagcgcatacaccaggtcgtccagacagtcctccaggttacgctggatggctttcaccatgttgtacttacgcttcttggcgatacgggcctctgtggctgtcttatccacatccgatacatcagataaatccccatagctcagggagacgttgaactcaatccgacgcaggtaggcattcagaccattgatgatgttctggtcacggaatgctggggagaattccttgtagagttcctcattgctcccctgctgtacgtccagcatccggtacagacggtcattcagtttcggcatgacgtattttgtcctgccttttttatctatcatgggttttgcctgcatagcagtagggtctacatggatggcccgctcaccggattcaaactcccagtccagtcgtccgaactgagtatccgtgtccttgatcaagtgtatggcaccgtcaaagacagacacaccgcaaaaagagccgtctatctcatttttgataggattgcaataataaccaaagtcaacacgatccattaatggatagttgataccctccggcagcttcgcccattcttccacatccgtgagaggcaccggacttccaatactgcccaagtcactggtatggtaagcctggttggtaacagtaagcccgttcttatccaggcaatggtactcaaaccgcaggtagtagctctgctctccggcctttttcactgcaatgaatacgatttttgtgggccgtccatcagcattaaactctaccggcatgaacttatctgcagtcacgtattccactgcgcctccgcccaaaggcttgatgcagaaggacccaagagctaaaccactctgcagattctcattgagtttccgtactgcagcctgatagatagtatctaatctttcgtttgaaacactggatgtcatttcattcaggcagacgttggcgaactctcggcagataccctgctccagcctcagggaatgcacctggtccccggtccactgggccatgcctttgtacatcaggctccattcttcaatcttgctgaccattgtgggtgagatagcaacatccctgcctatcacccgttttactgtgttcactgggaacatctttcggaacaccccctttattgcttttatgatcccttcaaacatcactgtcccctccgtttccagatcggatttgtcgcatagcggacggcatctatggcatggttgtctttgtctggatatccactgatcacctcaccgtccttatcccgctcgtattcatactccaggaactccgttgctgtttcggggcaccttgtattatcaatgacaatctcccggagggactgcagccatttcatggagtagtccacgctgccaggccccttctctgcccctcgggccagcaagccataactacgataatcgctgacggatttctcctctgcagaatcgcaggtgagcaagtcgttcctggtaatgcccatctggagcagcttgtccgcagtctggcggttgctctgcttattgcatcggtactccatgaagataaacaggcggagacgcgctgcatcataatggcagcgaacaaaatggaacgggtcagggtaccagccccagtcaaggccattgtataaacggtcaaactgcacgatctcatcatctgtgatcccacggatgaccacgttatcaaagacatttcctccggtaccgttagcaacacccagatactcattctcataggccgttggattaaccgctttgaggaactccgcttcatccaggaagggtttgcccagccatttcttcggtacatccagatacgtgctctccgtgacgagacgcgttgccttgggtatcttgatgtacttattggcccagttactagcgctttttggcgggttaaaggatttaaagatataagccagctcaccgccacggatgacggactgctcaatcttacgtactgattccgggcccgtgaactggtcaagttcctccagccagaggatgccgatgtaaccaaacggcaccttgatggatttcacttttcccgggtcatcggcaccccggaagtatatcttctgccctgtccttatgcgggtaatctccatagggcttactgttgcatggaactcatcggaaagcccaagagcctcgatagcccatagtatctgctgatatacggaaccacgcaacgtatcggctacctgccgcatcacaaccgcatgggtgtcctcatgccgcatcaacaggtcgaccacctgaaggctgacaaaggaggacttggtggaaccacggccgcccgggaatacatactcggtatgctcatgctccgcaatatcaaacaccacgggagcaaacgccggggctatcatgttggccgggatgccgtggtagataaagtcatcctgcggcggctccggttcccttgcctgggcttcggcattaaatttccgtgtacgggcttcctgctcccgcaagtcagaatcagattttgaggtctggccgatggtgtccttgatggcattgaacgctggcacattgcccattgaggccttctcgatcatggccatacttatgatctcttcgtaggtgctttcaccgccatcagcaaggagcacatcggaaaggccaggtacatcaactttcatggtcaggagacggttcatggtcttgcgcatgttggcagctctgcgccgggattccccggatgctttaccgccctttttcccgtttctcacggcttcctcacggctttgattgcttgtaaacggtactaagttttcattgttcgccatcacctcaccttcctatctggctaaaatttgcgtaaaagaaaaagagacaccgaagtgcctctcaaaaataatgcttattttttagataaatcatcacttatagatttaagactctcttgtttataatcttccaaaaatttaattgtatttccttccaaaacatattgccactgatcagaagtaggaaacaacaactcgttattattttgactagtattaatcgcatcatgaatttccaacccctgcgatataagctttgataatgtatccaaagttaatacagcgcgggaccgctcctcaggttccaactcactgcttccttctatttcatcaatcaatcgatccatatagagttgcgttgctttatcatgaacctctagcatattgttaatcagcttctcatctagctccatttttcgataattaagttcttgctgttgacatgttagtatatgagaatgcaacatgattgctttatcagttaatgtagctaaggacgttagcagcgctaatgccatactccccttgacgcaaaactcaagccatgcagacccaacgtcaagttttttcaattctatggatgcatcatttacgcttagataggggcattgtgataatactatattaaaattattaacacatttcgagaattctgcaaagtcagattttattggcattttaacattaaatccagtattctcttcttcatatccaagtgattcgcataattcaataatcgtgattagtttatctttcaatttctctttaatatgcaaaattttcctgcgctgttcatcatctgcttgaacatatttcgtagttctgactactaaaacactttcaactttgtatgcgtctataatgtatggttttaaaaattctaactctgataatgtatccagcgtttcctgaaaaagtcgtaagttttctacattgtagaatttatcattatatttattaaatttaatgcattctaactgtgaataactatctagacatatttgatatatctcatgtaatctcattaagctctccctctcagaaacattttcttctattttaccctatgtatcgacacaatgcatgccgtaaacattagtaaaataccaaaaatagccacacaatttgcatggctatttctgaaatgtaatgaggagggggactcataatgagtaaagtggccgcatccggaatcgaaccggaacccagggtgcgaccctgtccacctgccattggtgggatgatccacatagcggccaaaagtgttaccacagtcagccgggctataattctttctcgacaatcggaacaccaggagtcgaacctgggctgtacagctaccattgctgttgctccaccggcataagctatattccgatgcaccgccgaaacggtgcttgcttattacagttcaaaccggccacacccggtgccggcaaatcagccactgagctgtgacacccagcggccgatcgtacaaggaggtttacaaatgacttttataccaatctcagtttatactatagcagaatttatcgggacattgcgggacatttaaaaatatctttgaattcttttctttatattttcatcagtatatgcaatcttcctctttggaaacattatattcatccgtacagctactttaggataagaaagtccatctataaaatagagcctgaatattgttcttagttcgcttttttctatagattctatatattcttctgcctttaccatcagttcgaaaagttctgcctcttttcgatccagcatctttttgtactcctcaatccttgctttctttttgtaaaactcctgagtaggatatccagtgacccttatgcttccgaatgttccatcttttcttgtcccctttactgaatcagatactatacccagcttccttatttctttttcaagtttctcctttctcctgcgaatatccttgatttcttccatcatttccgcatattggactaaaatatctttgtccaatagattcacctcctcatcagctcccaaagcctgatatactgataacactgcctaatgttgcgctcatctgttacgaggacgtgatgtctatacagctcaactatcttaactctgtggggccttgtcaccacgccacgcctgccgccaccctcattacgcagatcctcttttatgtatattgtaatgtgctgacctcgctttagattgtgctccgcctccctaaggcgttgcagctcctcccagcggactccatttatagcttgagctggtgttaggtccgggtatccctcatgatttttatataccatcctgcacctccaagtctagctctttaagcatataaagtgggaaatgatataccctcccgtctgcctctacaataaacaccattctgccatatggtgagtcagccactctatccactattcccatatgattttcatcgagaattaaaaaatctcctacccttggttcattcatagctcatcctccatcaatcatacttaaccaccagacttgcaggcttacgcggaaatcgtacaagcaatctctgctcctctgcattttgatactctgccaacaatgtgccttttacagcatagtcctgttggagttcctgtacttgctccggtgtcaagccggtgtcctcatatctttgcaatctttgctctacattcgcaagagcatttgctatctgattaagtgatgtgtaatcagcattatctgccaaaaactgaattgtcaccccttcattggcaggcaatcctgctggatggaataatactgttccgtcctcgtctatccatgttaacctctccatattcatccctccttaatgtcccgccaggaacgtccgcatcacggcctcctgccagctctgtcctctccatctatcacaggtatcatcatcctctaccaggatgtccttacggtcgcacaggccgcagtcgttatccaggcaggtgttacaagttttatcgttgttcattccgcaccgccttttctcactatcgcaatggcatcatccaaacaatcaccgatttttttatatgccaaatccaaacttttatcacctgtgttagcgattgttaaaaatgcagttattttctgcttttctaactgctccgcaatccgctccataggctttcgggtgttccacgcatccgcagcaagtttttcactatcgccatctccgcaaggatatccttctcccctaattccgcactcatcacaaaacactgattcgtacgctctgctattatactcaaacgtgtcaatatatgcttccccgccgcaaaacggacagggtaataatttaatctcactcatggttgtcctccttgcttatggcgtccagacatgcattccatcccatttgttttcctttgcgttcaaaatccatcatagttcttgccgattttatacactcttttctttccggcagctcctgaagaggacagttttctgcccgtccttcatcgttaaaataattacatttttcattggttagtttgcacagaaagccaaaatagtcacaatctctgcaactttccggcatgtccataatcaatactgctttgctcattccgcaccgcctttccgcactatctcaatagctctggtcttttttatgtatctgccatgcaacgggtactgtgtaactttcagctcaatttcattttccaatttatttataatctgttcctcggctcgcttatattccataagttcccttgccagcaccgtatattccctgtcgatctcccggatctgctctggggtcaggccggtatcctcataggcttcaagcgtcgataccgcctcatataattttcctgcatatacatcttccccgcaaaacaacaggtctcctctttcatttcttccagttaatctctccatgcttacacctccacatcttcatccgctggcatttcaaatacaacgtgatttgcaattatcatatttgagtcagtcaataaggcgtcactatatgtattctgtatcatatcgagcacttttcttcctttttcaaatgacccatatttcccaacaatgtctacggatccgcgattactttcgatttttgcatgtactggcccgccagcaccatcattatctatccatatcgcaaaaatagaaccaaatctataaatcacatttctattttgacttcttatcagcatcaattacacctcctgtcatcctctataatcctcaaacttttttaccgccgcaaaggcaaaccttgaattaacccaccgttgcagtcttacaagatcatctccccggcgctttttgtatttgtcataaatcatcacgtatgggttgtaccccagctcccggagcgtatacacccggtcaagatcctgctctaaggtggtattgtatccggttagcacatacacggacattttccgatggtcccacccgatgatctcccggaagttctcaaatttcggaactatcatgtccttgtcctcataattgtcccaggcaaagtgtacctgcttgatcttcatgcgtttcagcatttcggcttttccatccgtcattagccggatgtcaagcccctggaaaaaagagcccggtatacccttacccctgcaggaggctggctcctttctagtgtttttacaaatccctatgccaccttattttcttttcctgtggcaccccgttgtctctacgtctgctgccagtccatattttccctccagcatcgccatcacatatgaaattactggccttcaagctggttcccggctctgaatgcagtatgtaggtgataatccgcttgtaccccatagcttttgcaacacggcaacaggctccatatagcatactgcaagcgttatatgtgccatccgtacacaaccgattaatctcacaggtcagtccatcatctaaatgtctgcttactggccgtccacagacagcacagcctattaatttatcgttgttgtaaagtcccacgcaaaacttacatcctactgttgctctatggtgtctatgatgcttgtttatgtaatcacttgcctgtctaaatgttattggtcttatttccatgatctcagagcccgctatagcatttctccggccgtaggctggctcctttctatttttttatccgttctaattgtctatccaatttctggttgataatggcctgtaactctccttctcccactgcaagtaattctttaagctgccatatcgtaatgatggtgtctgccatctcttcaagtaagtttgcatgagcctgtgctatatctctgctgcttcctccaaatttttgttttctccaaagcttattaatagcctgtgtgagttctgccatttcttcgatacactggcggctctgcgcctcgtatccgtatgtatctgcgataatccttattttttcttccatatccggctcctttcgcgtattttcaatcactgccggtactggctcccagctttggcttacgcccaatcaacggccccggcatccgtccgcttatggtaacggcgcacccgttgcgctactttgcgttatcagctctctgctcttttttattgcctatctggtttctgctccagagatttttttacaaggtccctcgttcgtccttgccccgtgttgccgataggacagcaaatgttacatgtccacataaattgccaagcaccccatttcggatgcaagttcttccaattcgctatcatccgtccatacaatacgttctacgttatgctgaccgcaatatgggcaaaccggaaatcctggcgggcaatcttcccgtgacttttctcctacaataaattcttttccgcagtctccgcacacatatttctcgtggttgtctatatagtaaccttctgtccacccatcttctctatacatgctttcctccattaaattctcagtcttttctttgtcctggcattttcctcgcatactcataccctgctacccgtaaagccctgggcaccccagggtgatccgtctccagaagtccgtcctccatcaggcgcacgatgtgtttatggatcgatgaggtactgctcaggcctacccccatagctatttcccttattgacgggctgtaaccatgatcctttatgtacctgatgataaaatgatagatgtccttccggtgttgctggccctctctaagcattcgttttttatatgtcatgattacctccttagtttcccagtctccagtaggccttggtattcttcccggcgcctctggtgacgatatctactccaaggcttgcctttgctttcatcaactccgaacgcttgatgcactggtcatcagccctgtagagcagatcccggccacacacctcgccagctcttaaggactcaagcaaaaagcgctcagccctctggtattcgtcacgggttatcaattcaacgctgtccttgattttttcgatctgtaccgtgtttgcgccggactttttcagcagcttttcctgggcctcctccagtgctgtgaggcgttcatttacttcgcttatgctgcggtagatattctcaagcagctttatggctgcctcgttccccggggcgctctgtgcgttctccactagctcaaaataccccggatctttccctagcagtaccgccatcaggtccgcaatgtttttcttgcagctccccttatccttgaggtaagtcaggtaactcctgtacttacccatctcgatcgaaaactctgtctccgttttcccggcgcccttaatggccaagatcagcttgtctatatccagttttacatcctcaatctccaatttctcacatcctctcaagggcggcgaacacttctgtgttgtccctcggttcaaaattattaaatctatttttcgacctcgccggacccgcagccttttgccccagataactatcaaattttgttccaaaaagtgtctgcggcctaagatacggcctcatgtccttttctccctccaccggcttgtgcccccattcagccgttttcttatcaaccacattgtaaaaatcatcaagagtgtgtccctcatcaaacctcgccttgatatgtttccggctgtcttttgatgtagacgtgaatgaggtacctgctttcaggttcagataatcaatcactgccttgtacgggtactcgggagtgcggtcggcacttgtgccagacgacatcttatcttttttcttttcattcttctcattctttacattcttgtttgtggtcactggctggtcatctgctggtcgtttgctggtcatctgctgtccactttgctggtcacatttctggtaatagtcccagttaagtattgtaatcaggctgtttttgttgctcgtctgctggtcaatctggtggtcacttttaaacgcattcaggattctttttaccttactttcgttcaccgacagttctgtggcaattttcagccgtccggttatcaactggcctggcctgagttctatcttctcgcccttaaagattgcagggcaggaatcgtgggaagccttgaggagaagatagacccacacggccagatagtcggcatccttgcacacaattggattatcaagcatcttcctgtgtaattttatccatccctccaatagcctcacctgcctcgtattctctgtatatttgtatccaggcatccaacggcatggtgacaagccattcgcagttatttttcctgtgcattactgccgggagatcaccgctcctggcatcacgctttgactggtccaccgcatcgtacagattaaggcgctcgttacgttttacctctatatgtatccccggaagcccaaccacatcggcgtcaccattagcgccggaatactgctgccctctcctacaatcccggtatccgtagctgcgtaaaatccccgctagctccagttctcctctttttcctttctgcctgctgtttggcatgttctatttccctccgtctatattcaaacgctgcttccatgcaggtctttttgagatatacatcatcagcccttgaacaatctcttttaaaatactctttgagttccaattcttcctgtactattcctgggatgggcctgtagtatccattccctatgttaatgatataatcaccgtttttattggcatgattgaccatatccctgaggtgcctgtctaccgtatcgtcatccggccttgcaattgcatggctccttccgtctgaaatacggtcaaaaaatgtctttgcgatatctttcttgttcaacccatcctcctttccccggcccccgtgacaggaaggggccggatattgtgatatatatggattttagttgcacccttttttatagaccagctttgacttgtcccatccggggtaaaggcggcgcatgtagctctctatgtagtggagcatttcgcccctgagccctttgttcccgttgtcaagcagctggtgatgataccggcagccctccacaccgttctgctctacaccaagtcctccctgggatctgttcacgatgtgcatacagtccttctggctgtattggtaaggatctgatgcattcatataaaagccaagctggcagaatatgcacccgccgtcccgctcgtgtatcttctttctggtctcctggctaaattgcaatgcctttgttctctcgttcatcattacctccgtctgtgtctatgccatactgctccttcagcctttgtttttcgtgcggcgtcatgatctcgctgtcggggatatcagagtccctgcagtcctgtatcagtccgctgataagcctcgccatttcctccgtgttataggtactggatccacggagcatgacataaacacagtatagctcgcctttcaccctcgtcacctttggcgtcggcatcaaatgatactcgactttgctcagcacgtccctctcagtcttatccgtgtccgggagagggacggctatcaactgcccgtccaacctctccagttgcccgtacctgcggagcatccggttatgagcttcggcattgttccagccatgcacccgggccagcttagtaagtagcacccagtaataggcattggcgtccagagaacgcttatccttatgccgcttaaaggtaacatcaatgtctttgccgtataggtctttgtatatggctgtgacgtcctcattgaccaataaggatacattccacttacccgtaaaaatatctcttcctatggatgaaatctttcctgtaaaactcatctattcatcaccatacttttctttaagagcgttcagcatagtgcctgcgtcaatctctgttagagtatttaatgattttccgtttgaggccacccagtaatctaaattaaccctatgcttctcacaaattgattttatagtctttaattgtgctgctgttgccaatggatcatcaccaggtatttgattggcaaacggcttgtgctcttcctttaaccacaagtcaaaaccaagacctgtgtgaatcgcaacgcatttgacaaaagacctgcacatgctattccacacccgctgttggctcatggagttgtctttaactggattactcccgttcatcactggcgactgcatgatatactcactttcgtcaatcaccacctttatcctggtctcatagcatctgttagaaatcccgttcttatccgtaaaggaaatatccgaataatacaggcttcctccagttttatcatttggtattgggacaaaatatactttttctgcgccgttgtcatgcagcaagtcaatacattttgcccagttaagataattcattccgtctctctgttcacagtaaggaagaatatctattttccgcatatcgttgaatggtttaatcattgtggtcaccccgcattccggaagaaacaatataagttatcgctgccatccccactcttgttacctgcgatatcctcggccttatggtattcgatatggtccatctgccagtctggattttcgtagtccagtacatagtgccctctggactggagttccagcaggagttcgttgactaccatgcagatttttggggatgtctgaagtttaatggccgcaattaggttgtccacttccatcaccgccttcttttttcttgtccgtatacgcttcccggcgcttctgctcattgatcttcatttttgttgtatcaaccccaagaacgcttaaaataacatccttgtcaataaagtccgtctcatctatataggcttgtacagcatccacacgtccgtccagacgcatgagccttgcaaactcccagtcctctacctctacatatttcttagtctcttccattgacttcctgcctttccggtgataaaatcacctcatagtaatatttgtttgccctcatttgcttgccggcgtgagggcttttttaatgcactctcgggtctttgcatcatggttgcactcaatccagtatttcccgtctatgcaaaccaggtcgtagataatctcttcatcatcaatgcagaatgcgctggtgccgaagttttcgccgcaggccgccgcgcttatgtggatactattttcaatcgccacctgccggattgcctccaggtgtggtgtaatctgctccgctatgttcttccactgttctcttgtcattctctttcacctcctctgaccacaaaagtccgataaagctgatcactcccagccccagggcgcccaccacctgctgtccgtcccactgccagataggcaggtacgatgccagggtgcccataatggcggccaggataatgttacgtttcatggcttgtcctccgtttgtcccagcgggtaggtttcaataaacctctccagatcactgcctcttattttcttctcacccagcttcaggtacggaagctttcctgaattaattaggccatacacggacgagactcccatgagtaatactttggatgcctcttttactgtgtatagcggtttgtagggttctaccatctgattcacctcctttactcatctggtgtactgcccgtaaaacgaccatgaagcattaagcattctttcgccgcctcattactttcacggacatatctttcaaaatttgttgctacagcatttgcatctgacggagatatctctttttcattcagtgttttcatcaattctgcaacaatctccagtatcctttgccttgtcaagctctcgcctcctttactaccgtatatggtattattgttaatttctgtgttatctcctataatctaagtacaggccccgccaggctgagtacgaaagaaaggagattaacattatgcgtagatattcaccgccgtttaatggaaagcgttacctgctcaacaaaaacactggcgaaatacacgacttagataatgaaacagagcattgccatattgatgatataaaacacgaacacatccgcatggatgattcttatatgaattgcgtattggcatctgttatgctctgccagcataaaaagtctaatggttgttattattgtttaaaggaaaaagataacggttgatatccttccgcgagagctgcgtcattaatttgccgtagctcttcttcgctcacctcacccatcagatgattgcaaagagcgtcttgtgtttttaaatcatcgacaaggtcaatgataattccggatgcgaaacgcacgtccaattgtttcagcaattcaaatcttgtcacctataccacctcctcattcttttaggttgctatccccatatctaccactgcgaatgcaggtcttttcaattttcactccatcatctttagacaaagtggctttaatagcttggagttcttttcttatggctacaagttcctggtatatcttcttaagcaccctcatcacctcctatcctaccttcttatcttgttccagcctttctgttttaagggccattccttctccaaggtaaagcagtctgtccttttccttttctgtcagattgggaataaccttctcaaaagttttaagtatttccttttccttttctgttaaagccaattttctcaccgtcctttcgccgcataatcaagtagcaaggtatgatccagaaaagtggttcacattcttgttgcttcgtgattattgtatatcactaagattaatttgtcaatacggtattatcatatttttgttgcaaagtgatattttatgtgttactatatacgcaggaggtgaaaaaaatgaacgaatccgaacgccttaaagaattaagaaaagtgctaaatattaagcagggggatttcgccaaaaggatttccactacacaagggcatatatctgatatagagaatggcagaaaaggattatctgatcgaactatcaaactgattagctatgaatttggtgtaaatgaggaatggctccgcactggagagggtgaaatgtttgtcgaaatggatagagacgaagaaattgtcgcctgggcatcaaagataacccgtagtgactatgaaaatgaatttgtgcagaattttgcacatgtacttacaaggttggatgaaaaagactgggaagttttggaaaaaatagcgctgcttatgtctggaaaaaagaaagactaggccgaagcccagtcaaatctttcctttaacaaatatcaatatcagttttaatgccttgtaatttgatatcttgttcactaactgcacgatttcatttttgatgcgctcttccttactcatatgtaacccctccgttctcattcgccaaacatacgttcgtttaattgtaatcattatactacatactgcaatgcaatacaagaacctatgtttggaaaattgtttttatactatatacacgtacctcgaatcgggttatcacggttttaggagcaatcgtccagaattctggacattattttgcaggggaatcatacagatcggaaatgtggatgcgtagagcaattgcaagcctttccatcgtatccatagtaggggagtatttcccgttgacaatattatttatagtagattttgataaaccagtcatattagacacctgacgcacagacaaatgtcttgcgtacatgatgtcaccaagcagaatcttcatagtaaatctattgtattgctaaatattagtagattctaccggtaaataataccatatatggcactaattattgcctgtgttgctatataataagtttatcacctattacaaaggaggagaacttatgggtttaatggatatgttcaatgcggggaaaatccgaaaggaaaatgaacaactaaaaacacaaattaatgagttgagcaaaaaaattaatgaattaggtgtaaatgattacttacaagccaaatcaaaaattgaggctttgaacttagagatttctgatgataacactaccatatcaaaattacgccaagaaatcgaaagtttgacccaacagaatgaacgtcttgaaaaacaggtagcaacacaatcccgtaagctttcaagacataaagaactttatagcagtgtagagcacgctctggaaaactttttaaatcttgatgtgccgtatgaaaattgcaaattatcacaacaggatttcgaggattacgagcttatttctccatcggtaatgctgaaactccattgtatggatatgagggacttaagaaaagcataccgagaaaatcaaaaacagataaccaagatattggaactatattctgctcgctacaccacaaaggccaataaatcgatttacaaccttatggttattgctctgcaggctgaactacaaaatatcctttacaacttgaaatatgagaaactggataaatctattgaagatataaaaaatgtttctgcaaaatacttaaaaatagccggagaaggaaatcaaaatatcgcagggacattaacaaaatttattggtgaaattgaatacctttttatcaacgctgtaaaaatagaatataactactacgtcaaaaaggagcaggcaaaacaagagcaacttgcaatccgtgaacaaatggggcaagaagccgaagaacgtaaagctctcgaagccgaaaagaaaaaaatcgagaaagaagaatcgaaatacaaaactgaaattgaaaaactacaggaagcaatcgcgcaaagtacgtcagatgagaacattgcaaaattacagttaaaaattctcgaattgcaggggcaattatcaaatgtcatcctcaagaaagaagaaattactaatcttcagaatggaaaagctggaaatgtttacattatcagtaacttaggttcttttggcgaagatgtctttaaggttggaatgaccaggcgtcttgaccctcaagatcgtgttaatgaattaggaagcgcaagtgtcccattcaaatttgatgtacatagctttatcttctccgaggatgctgttagtttggagggcaaattgcatgaagcactccatcaaaagagattaaataaagttaatttgagaaaagaatttttcaaagttacaattgatgaactcgaatcacttgtaacagaaatagaaccttctgctgaatttaacagaactatgttagcagaagagtttaggcaatcccaagagactaatgaggtttatacatctgattatagattatatgatgatgactcagaagatgaataaaataaaccggcccctggcggcaaccagagaccggctaacatagatactatacaggcccgtgaggacaagtataataccacttagacaaggttattataccacaatcctccagcgcctgtacaggcgtattttttgtacccaaaatccggccattgcgccggcacaaatataaggaggatgatacaatgggagaactacgaacacgaaaaagaggaaaaacctgggagtacagctttgagggcgcccgtgtggatggcaagcgcaaccctatatcgaaaggtggatttaggaccaaggctgacgctctggctgcagggaccaaggcaaaggctgagtacgatcaggcaggaagggtgtttaccccgtccacaatctccgtggcggattatatggattactggtttgagaactatgtgaaaaagcatctatcctacaacacccagagaaactatgaaaacaaaatccgtatccacataaaacccggcttaggaaaataccgtcttgcatccctgggtcctgatgttatccagctctgggtagacgatttaaaaattaaaaagggactatccaaaagcatgatttcttcctctcttgcttgcctctcaggcgctttgaaatatgctgtacagccatgtaaatacataaagtataacccctgtgattgtgtgaaaatgcccaaggtccccgtgaatagagaggccaaggcaaaagctgattacatactaccgaaaaacgaatggcagaccatcattgctcgattctcggatacccacttttacttaccattgatggctggattttatgcgggcctacgtctcggcgaaagctatggaatcgatttgctggaagacattgattttgaaaatgcaacattatctgtaaatcaccaaatgcaaaaatatgacaagacctgggtactatgcaatccgaaatacgactctttccggactattaagattgggccagagttactaaatgcatttaagcgtgagatcaccaataggaaaaagaacatgctcagatacggacaatactacttaaaaacttatctcactgatgacggcacaataactcaagcccgtgcagacatcaccgtaccatacaaagagatatggcctgtggcggtaaaagagagcggagaactgaccaacaccgactcttttaaatactgcgtgagggtaatccactatgccttgaataatccgatgttccaccatcactgtctccgccacacccacggaactatacttgccgaaaacggagcatggccaaggacagtcatggagcggctgggacacaaagatattaagaccacacttgagcggtatgtcttcaatacagataagctgcagaatgatgccgtggatatttttgaacgtgcggtgaaaaatgattttgcctaccccgcgaaaaaagggtaggcaaatggtagacaaaaagctatttttaacttgtgatacctcagaaaacccgcttatttacgggaaagtaaacagatagtttcaacatgcacactttgcccaaattgatccacagggcagactttcataacttcatatcccccctggcacagcttcttcaagtctcttgccagtgtggcgctgtcacagctgacatataccactcgtttgggctgcatctgcaaaatggtgtccagcaaggattcgtcgcagccctttcgtggaggatctaccataattacatccgcatagatcccgttcttctcgtattctcttggcagaacctcttctgctttgcctacgaaaaattccacattttttatatcattaatctgtgcgtttcttctggcatcgtggatggcctgggggataatctccacgccgtacaccttcctggccctctgggccaggaacaaggagatcgttccgatcccacagtacaaatcccacaccgtctcattccctgtcaggttggcatactccagagccttttcataaagctttcttgtctggactggatttacctgatagaaggacattggggaaatttgatattgaatgtcaccgatggaatcatagatatagggacgtccccataacagcctcagctcctcacccaggatcacattggtcttctttttattaacattcactgtgatgcttgtcatctccggcagctcacgcagggaagccaccagtgcttcttcttttggaaggctctggccatttaggatcatacataccatcagctctttgcttgtaaaaccatagcggatgagaacgtgtctcaccagcccggttccctgggcctcgttgtatggttctacctggtatttctccatataggcgatcactctgtccaaaacctgtttgttttggggcacacccaatgcacagtctctgttttcaatgatggtatgggtgcggcctgcgtaaaagccggtaataatttttccttctttgtttcttcccactgggaattgagccttgtttctgtaatgaaagggctcttccattcctatgatgggctccatggggggattgttaaggcctgcgatgcgttccagattgcccctcacctttttctctttaaattccagctgttttttataatccagggcttgtatctggcagcccccgcattgccgggcgtaggggcacctgggttctacccggtagggtgaaggttttaaaatttccataagtctggcatagccgtagtttttctttgcttttattatttttacctggacagtgtcaccgatgactgcgtcttttacaaaaacggtgaagccatccgccttaccgatgccttcaccgtctgttccgcaatcttctatgtataacgtaatgagatcatttttacgaaagtccataaagattaccattctcctgttctttttaaattggattcaaataagcggttataacccagccactctttcttgcccttatctcctgcaaaaatctctgtgagggtttccattctggcgtctgcattgtctgccagattcagggcaacggcctccgccagggcgggttttttgggggagccgaactccagctcgccgtgatgggctaagatacagtggacaagctcgttttttaatacttctgggaaatctgggatttcacgggccagatcatagatgatctgggagccgataacaatatggcccaccagctggccttcatctgtgtaatcatttaacggaaaactggagagttctctggtctttccaatatcgtgacacagggctgctgtgatgagcaggtctctgtttaaaattggataggcctctgccatgtactggcagaactttgtcacgcccagggtatgctccagaaggccgccgataaagccatgatgaactgtttttgccgcggaatggccttcaaaggttttcttaaaatcctgatcttccacaaaaagcttgttcagcagctgggaaagataagggttttgaatactgttgataaagttcacaagctgcccatacatatcatctgtgctgttctcgcttacagggagataatctgcaggatcatattctccctctgctgccttgcgcacacgcttgatgttcagctgcatggctcctgcaaagctggtcacatcgcccacaacttctatgtaatccaaggtatcgaaatcatcaatgccaagggaattggggtcccagattttaccgtccagaactcctgttttgtcttgaataataatactttcgtagggttttccgttcttggtcacagcggactgtttctgtttacataaataaatgccgttgatccggtctccttcatgtagctcatttataaatcgcatatgtgtctgcctttctattttgccttattattggtgaattttattaaaacagcctccttgatccaatggagagctcagtctattctccatagtaatataattatttgctttctgtcaaccaaatatggctatttttacgcagtcacaattctcaggggtttgtctgtgctgtcacagacagctttatctcctcataatctccgtccaccttttttcgcattaaggcaactttgatctgctgtccttgttcatatttctgaataatggaaaaatactcctgtgggttctggacctgctggcctcccacagcggtgataatgtccccgctttgaataccgcccttcatggccggggattcttcctccactttatctacgtaaacaccgccggaaagcttccagctttctttcatattttctggtatttcttttccatatattcccacataggtcactggagttccattggccagggcctcgatcaaaggctttaactgtgagatcgccaaggccttcaccagaggagcggcattttcataggcggtgtactcctgggccagaagaccgatcacctccccttctaaattcagcagaatcccgcttccctgctcactgccgggaatgtccgtgatgatcagatcgtattctccgtcactgacgcagatccttccggaaatgcttgtgactcttccaagaatgaccgaatcgggataccctgccgggctgccgatggcaataaccggctggctgttcttgatactgtaggaatttcccagggagaccacttccagattgtctctggtctcttcagaaatgtctttggcggggacgatcaccaccgccatgcccaggcggctgtcactttctcttaaaaagcctggcaccgcggttccgtccgagaaggtgatggtcaggcttctggcttcctgggtagcggaatcctctgttaaaatatacagattttccccgtcatccagaaaaatcacaccataggcctgcccggtcttaatattggaattatccagcacgtcctctttttccatttcacctgtaactgtcaccagagccttttccggtttctcggtgacggtctgaagttctgaggagattttttcgtaattctccagagaactctccattcctggctgggcagaacttacccctgccttttcttccttactctgcacagcggtgctcctgctttcctgtacctgaggctgtcttgtaacaatgggggtgtctctgggaatgtccactttgggcacatcctccccgctggcccgggcggagagatcaggaactgtgctgaggatcaccgctgctgcgcacaccccgaacaaaacgccggcacctgccactgccgccgccttcgtaagcatgatcctcacatccacaggccttctcttaatggtttcccggataaaatggtaatcttctgtgcgggccttcctgtcttctgcatgaggaactttgttctgctgatttctcattgcatttctccttattaaggcaaaataatctgaaaataattttagcaaatacatatgaacaatttatgaataaaaaagcacattttccttttcaatctgccataaatagggtagaatagggactagaattttataccatacagaactactataccttatcaggagtaaatatgaatcagaaagcatataaagcattagaatacgacaaaattatagaaaaacttacagacaaggcctcctcacccatgggaaaggagctgtgccgaaatctggttccttcccaggatatagaagaaatccgcctcctgcagacccagaccagagacgccctgtccaggatcttccagaagggaactctatcttttggaagtgtgaaggacatccggggctcattaaaacgtctggaggtgggcagcaccttgggtattggggagctgctggctatctgcagtctgctggaaaatacagcaagagtaaaggcctattcccgttctgaccggggggaggcacttccggattctctggatgccatgttcgctgccctggagccgttgacgccggtatccacagagatccgccgttgtattttatcagaggatgagatcagtgatgacgccagctctgctctgcgccagatccgccgtggaatgaagatcgccaatgacaagatccactctcagctctccggactggtgaacggcggtgcccgttcctatctccaggactccgtgatcaccatgcgcaacggacgctactgtatccctgtaaaagcagaatataagaatcaggtgcctggaatgatccacgaccagtcctccactggctccaccttgtttattgagcctatggccattgtgaagctgaacaatgacattcgggagctggagcttcaggagcagaaagagattgagatcattctggccaacttaagtgaacaggtggggacccagcaggaggccatctccacagatgtctctattttagtggagctggactttatttttgccagagcctccctggctatggatatgaacgccacagagcctattttcaatgaggagggccgcatccatctgcggaaggcccgccatcccctcattcctaaaaagcaggtggtacccattgatatccgtctgggggacgatttcgaccttctggttgtgacaggtcccaacaccggcggcaagaccgtctcattgaaaaccgtgggcctgctcactctcatgggtcaggcaggtctgcacattcccgcctatgaccgttcagagctggcagtgtttcaggaggtatatgcagatatcggggatgagcagagcattgagcagtccttaagtaccttttcctcccatatgaccaacgtggtgtccttcctggaaaaggctgacacccactctctggttctctttgacgagctgggcgcaggtacggaccccacagagggcgccgcactggccatttccattttgtcttacctccatgagaggggcattcgggccatggccaccacccactacagtgagctgaaggtctatgccctctccaccttgggtgtggaaaatgcctcctgcgagtttgacgtagagaccctgcgtcccacctaccgtctgttgatcggcgttcctggaaagagcaatgcctttgccatttcctccaagctgggacttcctgaccacattattgaaagggccaaagaacagatcagtgagcaggacgaatccttcgaggatgtgctcaccaatctggaaaacagccggatcaccattgaaaatgagcgtttggaaattgagcgttacaaaactgagatcaaagaattaaaagaaaaactggaattaaaagaagagaaaatggccaaacaaaaggagaatatcctccgtcaggccaacgagcaggctcatgaggttctccgggaggccaaggaatatgcggaccagaccatgaagctctttcataaatttcaaaaggatcatgtggatctggccgctgtggaggagcagcgccagaacctgcgcaagaagatgaacaaggcccaggagggcatggccatgaaggcagaggcccagcagcccaggaaaaagctgcgtccccaggacctttccataggcgacagcgtgaaggttctcagcatgaatttaaagggcacggtgagcacccggccggaccccaagggaaatctgtttgtacagatgggtattatccgctccaaggtgcatatttcagacctggagctggtggatgagccagtgatcaccgccccctccatgcagcgcaccggcgctggaaagatcaaaatgtccaagtccttcggcgtatccacagagatcaacctccttggaaaaactgtggatgaggccattgcggaattggacaaatatctggatgacgcctacctggcccatttgaacaatgtgcgcattgtccatggcaagggcaccggggctttgagaaagggcgtgcacaattacctgaaacgtcagaagcatgtggcctccttccgtttaggagagtttggtgagggagatgccggggtaactatcgtggaattcaaaaaataattttcaggagataacagtatggcagcaaaacagaaaatcctcattgtggatgatgacaacaatatagcagagctcattgccctgtatctgacaaaggagtgctttgaaacctccattgtcaacgacggggaacaggccctccgggaatttcatattttccatccggatctgatcctcctggacctaatgcttcccggtatggacggctaccaggtgtgccgggagatccgccacacctcagatgttccgatcatcatgctctctgccaagggggagacctttgacaaggttctggggctggagcttggcgctgacgactatatgatcaagccctttgactccaaggagctggtggcaagagtgaaggcggtattgcgccgtttccaggtgaaggcgcctgtggtgtcctccagcgaaaaatgtgtgaactatccggatctcaccatcaatcttaccaattattctgtcacctatatgggcagccaggtggatatgcctccaaaggagctggagcttttatattttctagcctcctcacccaaccaggtttttaccagggaacagctcctggatcatatctggggttatgaatacatcggggatacccgtaccgtagatgtacatattaaacgtctccgggaaaagatcaaggatcatcccagctgggccattgccacagtatgggggatcggctataagtttgaggtgaaggcttaaatgaaaaaaacactgtatcgaaaatttctcctgctgtacctttttataggtatagcaggatttctccttacagccacctttggctcttatctggtggagcgccacctggaggcctccaaaagtgagagcttttttcgtggtgccaacacgctggcccagacgcctaggctgcggtacaacgccacccaggaaaccgtggaggccatcagtcctaccttgtcagccatggccgccagccagaagatccaaatctggatgttgaacaaagaggggcagatcctgctggatacctcttcagaccagatctccccggacagcccccagaccatccagggctttgaccctacctcctggggaaacaattattatcaggtgggaaatttttatggtcatttttcccaggacatgctcagtgtcatcgcccctatcacggcagacatgggcattaaaggatacctggcctttcattatcccatgaaagagctgtatcaggagcgcagcagccttgtgatcatcctgcaggtcatgttctttttgttttatgggatctcctttttgtttctggctgcttttactgttcttatttatcatcccctggagaagatcaccaagggggcagatgaatttgctcagggaaatctgacctaccatatttctgtggatacagaggatgaactgggctatctggccagaaccctgaattatatgtgcgacagcgtaaacaaaaacagtgagtaccagcggaattttatagccaatgtatcccatgatttccgctcccctcttacctccatcaagggttatgtggaggccatagaggatggcaccattccatatgaaatgcaggggaaatatctgaagatcgtgtccaacgaggtaaaccggctggaaaaactcaccagaagcctgctcaccttaaatgacctggatatgaaaagccggatgatgaatattcagacctttgacatcaacagtaccatcaagcgcacagcggaaacctttgagggcagctgtacggaaaagcagatccagctggagctgatcttatataaggagcagctttttgtcactgctgaccaggaccagatccagcaggttctttataatcttttggacaatgccattaaattcagccccttcagctctgtgatcaccatagagacctcagagaaaaacgggaaaatctttgtgtctgtgaaggatcacgggaccggcattcccaaggaaagtctttccaaaatctgggaccgcttctataaaaccgacacctcccgtgggaaagaccgcaagggcaccggcctggggctttccatcgtaaaggagattttaaaggcccaccatcagaatatcgatgtgatcagcacagaaggagtggggacagaatttatcttttccctggaaaaagggaaacaaacccattgatgcttcctctggcaattatccctggtcaaagggactggccaggattttcccctgttccacctgataaagccctctgggagtgatgcgcagggaggggatcacaggaagggccatgaaggacagggtgataaaggggtccatcccctccgggattcccatgtcatgggctttcttgatcattctttttaatttttcattgacgctgcgaaaaccagcgtcactcataagccccataatgggaaggggcagggtttcatacacggacccattctctgcgatcgtgtagcctccctgggtgcggatgagctcattcacagccagagccatatcggtgtcattgtccccaataacaatgagattgtgagaatcatgggacacgctggaggccacggctccgccccggatgccaaagcctgtcaccacaccgatcccaatccttccggttcccttatgtctttcgatggctgctatcttcttataagtttcatctggctcaaagaccttattaccgggaacctctctttgcagatcctttgtaaggatctgcccggggatcatttccagcacatggcacaggccgttttccctgggcaggatcagatcctgttccgagatcctgcttaaatgtacggtgtttttcagggccggattgcagggtttcacttccaccggtgcatccttttcaattttctttcctttatgatacacagccagaacattcaggttctccaggtcatccaacaccagcatatctgcctggtatcccggcgcgatggctcccagatgcttcagcccatagcaccgggctgcctgtatggtggccatcttaatggccttatgcactggaaggccaaggctcaccgcctttttcacattgaaattgatgtggccctctgttcggatctcttcactgtgtttgtcatcggtacagaaacaaaacccggatgtatccgtgtggttttccacaattcctttcacaatggcctccagattcttggctgcgcttccctcccggataagaacctgcattccccgccgcctctcttccatggcgtaggcatagtccacacattcatggtctgtggcaattcctgccagcacataagcgttaagatctccctgtgacagggacggggcatggccgtctctcaccctttccttaaacagctccagcttttcatgcatggctacacttccttccaccacagaaggcacatccataacctctcccagccccagaattctgggattgtccagatagcttttcattttcccggcactgagggtgcatccgttgtcatccacacgggtggacggcacacaggagggcatcatcacatacacattggcaggcacatccgccgtctgctccagaatatagtcaatgccgtctgtccctgaaacattggcggactcgtggggatccacaataaaggtagtggtaccggtctgggccgcctggccgatcagttccccaggagtgatcaaggtggattccagatggagatgactgtctataaagccaggacagagatattttcctgtaaaatccagctcctcctccccctcgtaagctcccacgcccacgatcaagccctgggcaactgccacatcgcagatgagcacctcttctgtaaaaacatttaccacatttgcatttttaaataccaatggggcttttctcattcctctggatatttccgacaatgctctgtaggtttccagttccatacggttctcctttcctattatttatattttattgtatatctttttaaattttctgttttctatctcatttctattatattgtattttatattatcacaatagagaaccaatggcaactcttcctgaagaaattagagaaagaaaaaagatgccggagacctaggtccacagcatcttctgtctatttccaatggtattttgtcagctggccctccagcttcatatggtcaaaatcatgctggcgcagggcttcgtaaagaacaatggcaacggaattactcaggttcaaagaacggatgtctccgatcatggggattcggatggaggtgtcttggttggccagaagaatctcttctggaattcctgcactctccttgccaaacataatgtagcagtcttcctcaaacgctgcctctgtatagatcctggggcctttggtggtggcataatagatttttgccccgggatttttttccaaaaaatcctcatagtttaaataggtggtcacatccaggtccttccagtagtccatacctgcccttttgatggacttttcgttcagacgaaagcccagaggttcaatgagatgaagcctggctcctgctgctacacaggtcctgccgatatttcctgtatttgccggtatctccggctcatggagcacaatattgattcttgccataatgcctcctatactcttgtgtttgtactgtgagactgcttccagactcacttttggcacgggttttcacacctgccctttttggctgcttgtaaataacttgtgtatttcgtctgctctgggacggtccaggtaccgggtatgaccctggttgtgaagaagccgttcccggcggtgtgtggaatggccgataatgaccccggggattccctcctgctccaggcaccggagaaattccggggcgttgtctgtccccacaagaagggctccctccgactccagttgataggggttgatctcatagggttcacatacctcaatggtctcctggcggatcgggatttttcttaaatcaatctccagccccacctgtccggcttccgccattttccacagggcacttaatattccgccttctcccaaggcatatctggcgctcacccccagcccttcccccaccagccattccttctcaatggaggggtgctcccccagccggagagcttcctccagaaagcctctggaaaaccgccctgccagctcccggtacttctctgtgacaatctttcgggtccctgacagagcgatagatctggtgaccaccagctcctgttccggataaagctgcccggtgatctgggcctgcagagcttccattgctgcttgtccaagtctcatggctctgctcctttaaccgataaagtagatcagtcccggcacaaccatagccagaaccagaatgatcgcaatgatcgcggcgaacaacttgcgtttcttaggatcaaacattcccatagctgccatcctccttacttctttttatattctttacagtatttcgtcaagaaacattcctcacatttgggacttctggcaaagcagatctgccgtccaaatgtaatgatctgaatattatataaaatccaatgatcctttggaagaaccttcataagctcatactcaatcttctccgggtcctcttccttcgcaagtcccaggcgcctggatatgcgcttcacatgggtgtccacaaccacactgggctcatggaaaatatttccacggatcacattggctgtctttcgccccacgccaggcagggaggtgagctcctcgatggtccgggggacctgtccttcatagtccttgatgatcttctgggcgcagccgatgatgtttttcgctttattatgataaaagcctgtgggctttatgtcctgctccagctcccttaagtccgcctgggcaaacttttccatggaatcgtatttgcggaataatttttcagtcacctggttcacccgggcgtctgtgcactgggcgctgagcatggtggctatgagaagctgaccgggattctcatggttcaggtagcatttatattctgtggtatatacctggtccagcagatccaaaatttcctttgtgcgttttgtcataaaagaacctcttctgtatgtgcatttctggtgagcgggcagcgtttttcatagtcgaacagcacagcccttccctgggagaacacctccacatgggcggtctttggaatgtggcaccttttgcgcagctgccatatctgagcttcatagagcttctggtccggagcccaggccggccggttcttcagtttttcccttaaataaaggtcatagagcatggcatcctttgcctgctccatggggatctgtggtctctccctgaaaaattccagcaggatctcataccggcgaagcctggaatgagagatcacgtcatagcccttagcttcataaaattctcccagctccttaaaaaatgaaaaggcgctggcaaaataaggtaccgccagatccagggtgtgctggaactgaccactattataatacacttccaccatactttccactgttttcagcaaaagcacatcttcataggaaagccatttggtgccaaggacctcatagggttccttctcctgatacacacagccgtactcctgtacccgctcagccatataggagcctttgagcaccttcaaaaagccaagctggagctgctggggcctcagggaaaatacctcctcaaaggaacggcggaagctttccagatcttcatagggcagaccggcgatcaaatccaggtgctgatggatatttcccatagcccggattctctgggagatatgtgcgatcttggaaaaatccgacacccggcggatttcctgaagggtccttggattggtggactgcacgccgatctcaagctggatcaggcccggacgcatggtcttcatgcactccagctcctcctcattgagaagatccgctgcgatctcgaaatgaaaattcgtgaccccgttgtcatgctccttaatataattccacacagccagggcatgatcatgcctgcagttgaaggttctgtccacaaattttacctggggaaccttgtggtctatgaaaaactgcagctcctttttcaccagcgtcagatcccggaaccgaagccgtttatccacagaggagagacagtagctgcaggaaaatggacagccccggctgctctcgtaatagatgatccggttctcaaaatccgacagatcctcataggcaaagggtacggaacttagatccaggatctctctggccgggtttgtacagatttcagctcctgcccggtatacaagacccggaatctggtccagcttccttggacttccttcacagtagtgggccgccagctccaaaaagacagcctccccctctcctgtcatcaccccagtcacatggggattttccataagaaatctttctgcatcaaaagaaacctccggaccgcctgtccacagacaggtatccggaagtatcttctttaattccacaaggagctctctcacaaaagagatattccagatgtagcaggaaaagcacaccacatccggcctgcaccggaaaatatcccgcagaatttcatctttttgctgattgatggtgtactctctgagcacaatgtggtcttcataggccttggcataggcctttaaattgtatactgccaagttggaatgaatatatttggcgttgcacgccgccagtaaaatcttcatcttgtggtttttccacctgttttctctatatttccggcacaggaccggccgccgcagccctgacagccgccgcagtctccgcagcagaagcgccctgcctttatatcccggatcttttttcttattatatacgccgcatataggaaaatcaatgccgcaacaacaattgtagctgtcatagaccatacctcctggggtaaaacatgctttactagaaaatcagacttcccacctggaataccagcacagcggccacataggccagcacaagctggaacaagatcacctgcagggtgtatttccaggaattgctttcttttttgatggtggcaatggtggccatacagggagtgtacagcaggcagaagaccatgagggcataggcgttcacagggccgaagccgaactggcccagggctcctgagaggccggccatacctgctgctgaattaatattgctgatgccaaagagcacggaaaagctggataccaccacttcctttgcagacaggcctgcgatgagggccactgcgatctgccacagccccatacctgcaggggccagaactggctccagccagtggcccagaacagcgccgaagctttggctcacatctgtgaccattccctttgtgccaaaattcaaaataaaccagataacaatggaggccacaaatattgtggttcctgccttggacagataatccttcaccttctcccatacatagatggctatggtcctggcattgggcattttatattccggcagctccataagcagggtaccggcgctctctccttttttcatccttcccaggatcagagcaatgacaatggccatgaccattcccagcacatacatggagaaggctgccacagaagcatagtttccaaaaaaaatggaggcaaaaagtacatagatgggcagtctggcagagcaggacataaagggcgtcagaagcatggtccgcctcctgtcctcctccttctccagggtccgggtggccatcaccgcaggcacggtacagccaaagcccagaaccataggcagaaaagcttttccagaaagtcccacacggcccataaggccgtccatcacataggccacacgggccatatagccgctgtcctccagaattcccagagccaggaacaaaataaagatattgggcaggaaggtgagaatccctcccactcctgcgatcacgccgtccactaccagggagatgagccactttgaggctcccagagcgtttaatccccctgccgctgccccaagcactgcgtccaggccgatctcaaacacccccttcagggcatcgccaatagtaaaggtgaggaagaataccaaggccatgattcccaggaaaacaggaacaccccataccggatgggtgagcagccggtcgatattgtctgtttttcctgcgtgagcgccgcttttgtggaagagtacctcctccaccacttcctctatgtagtcatatttctggttaatgatctctttttcatagcttctgtccagaatatccggtgcatccaggggatattcctttaaggtctcctcatccgcctccagatgcttcacagccacaaaccgccggaaggcaaggcccggatattttttctcaagaagctcttcaatggctgcaatcttatgttccagattgtcgtcatagtgtaccaccgggccctggacctcttcatcataatggtgcttcactgcatggagaagcacattcagtccagttctctgtctggccgatacagggactaccgggatatttcccagaacctcgggcagacggtgggtgtcaatctccatcccccgctccttcaccacatccatcatgttcatggccaggatcaccggctttcccagctccagaagctgcatggtcagatacaggttccgctccaaagaagaggcatccaccacattcacgatcacatcaatgctgtcctccatgacgcattttctggacaccttttcctctatagaataggaagtaaggctgtaaattcccggaaggtccaccaaattgatcttctggcctttataattggctactccttcctttttttcaacagttactcccggccagttggccaccttcaggttggcgccggtcagtgcattaaacagggttgtctttccgcagttggggtttcccacaaatgcaacccggatgatgtgctcactcattgtctaattcctccacttgtattcctctggcgatttcctttcccaaagcccagcgggttccccggacacggatgattgtggccccgcttttcttctgattcaggatctccaccctggttccctccagaattcccagagcttccaggcggcgctggacatttcctctctcttcaatggcttttacctgataccagcttcctctatgtgtttctagtaaggtcatttttccctctccttattgagaatcattttcatttaaattatatggaggttcttcacgtttgtcaacctatatttgccaaattcctccggatccttattgttttttcccacgtcatagtctaaaataagtctatatatgagtcaaggggataacccctcatgaaaaaaacaccttcaggagatcataatttatgggaaataccgattatacaagttttttcagcagttttcctttttgggaaaagctttcttccacagagcgggaatatctgctgtccaatataaaaaaagtacattatgaggcaggggaaaatatccagtcagacacttcttcctgcctggggcttctttttctggaaaaagggatccttcaggtatacctcctgtccccagacgggaaagaggcctctttataccgtctccatgacggggatgtgtgtaccctgtccgccgcctgtgtcatggctcctctcacctttgacgtgtacgtggatgccatcacccagtgtgatgggctggtgctcccctcctacaccctgaaaaagctcatggatggcaatgtgtatctggaaaatttctgctataagctcaccatggagcatttttccgatgtgatccaggctctggagcggacctttttcctcacccttcctcagaggatcgctgcctttctgttggacgaatcctctgtgcagaatgcttcacatctgaccatcacccaagagcagctggctaaggacattggaagcgcccgggaggctgtaagccgtgcactgaaacaaatggccgcggaaggatctgtgaaggtctcccgcggcggcattgaaattcttaataaaagtcttctgtatgaaaaattaagctgactgaaggacttctttcagggtatccttggactgaagtcctacaaggcgcttcacttcctgtcctcccttgaacacgatcatagtgggaatgctcatgatggcatatctctgagccaggcccggattctcgtccacgtccaccttgccgatgtcaaatccctctcctgacagttcctctaagatgggcgcctgccggcggcagggtccgcaccaggttgcccaaaaatctaccagtgtaacgccctgtgcctgtaaaacttccttttcaaatgttccttctgtgattacctttgccatgattcaatctccttttcttattctgatattgtaaggttaggggcaaaaaatattttgccctggtattatatgattatttattcaatgatcttacatattttcctgcattgatccctgccagacagccttcatagaccgcttttgccacctgcagcagtccgccggtgcagtctccggcagcgaataagcctggaatcgtggtctgcatggtatcgtccacagagatatttcccttctctgtgagctcagctcccatctgccttgcgatctctgtacttccagcagttcccagagctacgaaaatcccatccgtatccaaaatactgccgtcctcaaagatcacccggcccacccggtccttcccttggattttctctatcttccggtcatccactgaaaagtcatgttccccggaaaatgcaggagacataccattggtgaggatcgttacatttcccgccagattctccagctctcttgcctcatggacagcaaagtccccgttccccagaaccgctacatttttgccccggtagaagaaagcatcgcatacagcacagtagctgactccctttccctccagctcccggacgccgggaatcttgggggctgcccgcttggcaccagtggccaggatcacgctttgagcttccagagttcccccagtggttctcacctcaaaagtgtcaaaaccgccaatccccaggacctgtgtcttcaggatcctgacgcccagctcctttgcctgggaaatcccattctcatatagctctttcccggaggggaaattgggtgtgccataatagttttcgattttctccgccttctccagggccccgatcccgttgtccagaaccagtgggtccatgtttgcccggaccgcatacagagcggcggatatgcctgccggccctgctcccacgataattactttttccatttgctcacctcttattctcttggtcttactatatgtcttttttccagtttcttccgtgattaagtcacagaacttctgaaatttatcctgtagcaagcttctcccctttcctgatccggttcctggtacaattaggaaaggacagggccaaggccctgtcctgaagaattctcttatgcatttaacggatatttatctgtcagctttttcacaatggctctggcctcgtccttgtggtcacggctcttgagcattaaggcaatggcctcggcgatctgctccatatcctccggcttcattcctctggaggtgacggctggagttcccagacggacaccgctggtcacaaagggtgactggggatcgttgggaatagcatttttgttgcaggtaatgttcacttcatccagaagattctccatctccttgccggttacacccaaggagcgcaggtcaaccagcatcaggtgattgtccgttccgccggatacaatgtcaatgcctctcttctgaagaccttggcagagagccttggcattttccactaccatctgtgcatattccttgaattccggatccagcgcctctttcaggcagactgccttggctgcgatcacatgcatgagcgggccgccctggatccccgggaatacagctttgttaaaattgaatttcttggcattttctgcactgcttaagatcagtccccctcttggtccccggagagttttatgagtggttgtggtaaccacatctgcataggggatggggcttgggtgctggccgcctgcaacaagacctgcaatgtgggccatatccaccatcagataagcacccacttcatcggcgatctccctgaatttcttaaaatcgatcaccctggcataagcgctggcccctgccacgatcagcttcggcttacattccttggcaattcttctgacttcttcatagtcaatgacaccgttatcgtttacaccataaggcactgcatggaaataggcgccggacatgttggcaggacttccgtgggtcaggtgtcctccgtgattcaggttcatcccaagaacagtatctcccggctttaacatggcatagaaaactgccatatttgcctgtgccccagagtgaggctgcacatttgcatactcacagttaaagagcttcttagctctctcaattgccagtgattctacctcgtctacgcaggcgcacccgccataaaatctttttcctggataaccttctgcatatttatttgtaagcggacttcccatagatgccataacagctttactcacccagttttctgatgcgatcagctcaatatgagaattctgacgttcaacttctctctgaatcatatccgcgatctgcggatcaaccatttcgatttccttcatggaatacattctgttttctcctcctatttaaacacttccatcattatatacagttcgaccttttttgtcaaccctcaacgcacatttgttttttgcacaaaaacattttacgaaaaatgcaaaattttttttgactatttctattgaatttgctttaatagaagtaagcgcttcttatgttaagggcttgctcaaagatgtcataagatctttagaaagggctataaaattatgagaaattttgaatactatgcacctacccgggtggtgtttggaaaagatacccacctgcaggcaggaaagctcgcaaaggattatggagcacataaggtactggtgcattatggcggcaacagcgcaaaagaatccggtgttctggatgaagtctgccaaagtctcacccaggccggtcttgcctatgtaaccttgggcggagtggttcccaacccccgtctttccaaagtatatgaaggaatcaacctgtgccgggaacagggagtggattttcttctggcagtgggcggaggaagtgtcattgattcctccaaggccattgcctacggcatcgccaacccggatacggatgtgtggaacttctataagaagaccgagactcccaaagcctgtgcccctgtgggagccatcctcaccatcgctgctgcgggaagcgaaatgagcaactcctccgtgatcaccaatgaagatggctggctgaaacggggttaccgcaacgacctgtgccggtgcagatttgccgtcttaaatccccgcctcacctacaccctgcctcaatatcagacagaaagcggctgtgtggatattctcatgcacaccatggagcggtattttgtaaatattgaaaccatggagatcacagacagcatcagcgaggccctcatgcagaccgtcatctacaatgccagaatcctgttaaaggagcctggaaactacaatgccagggcagaagtaatgtgggccagcagtctttcccacaacgacttgaccggctgcggcactgcaggaggggactgggcctgccatcagatggaacatgagctgggcggcatgtttgacgtggcccacggggccggactggcagccatctggggaagctgggccaggtatgtgtataaagaaaatcctgagcgttttgcccagtttgcagccaatgtattcgatgttccctgcagcactgactatgagaaaacagctctggcaggcattgaagccatggaagatttcttccgttcagtggaaatgcccaccagcctcacagagctgggccttgacctgacggatgaccagattcatgagctggcctttaaatgtacctttgaagacacccgcaccatcggagttttcaagcagttaaaccgcaaggatattgagaagatttatttcatggcacgttgatcaatggccttatccccctgcaaaaaagttaccgttcacaagcggactgcaataaaagaaacgatggtttgaactgatctcagtccaaaccatcgtttctttttatgtaaatatctcaaattctgttcaaaataagagttcaggaggccccttcagggtgtcagagattgatcatcctgcccaaagccgccatccgctgatcatgaaacttccgccagtgcggcggagagcactgccatatccaaaggcttggccacatgagcgttcatcccggcatcccgtgcccgctggatatcttccgcaaaggcatcggcggtcattgccacaatggggattgtgcgggcatcctcccgcttcagggaacggatcgcccttgtactttcatatccattcatcaccggcatctgcacatccataaggattacgtcataagtgcctgccggacattgagtgaatctttccagcacctgccggccatcgctggtgagcgtggtctgcgctcccttcatagcgagaagctcacagataatctctgcattcagttcgttgtcctccgcgatcaaaaagtgtttcccctgataatcgaacactgcgtcatttcccggggcggatacgctctgcgcctggacaccatcgtcctggatacgcagagacaattctacggtaaaggtacttccctctcccggcgtgctgtccacatggataatgccgcccataagctccacaatgcccttgcagattgacatgccaagacctgtcccctctatctttgacacggtaaggctcctctccctggagaaggggtcaaagagggtttttaagaattcctctgtcataccctgcccgttatcctgcacggtaaagcggaaacttgcacagttggcaggggcccggtctaattcctccactgtaaagcagattctgccgccgttctgcgtatatttcactgcgtttgaaagcagattcagcaaaacctggttcagcctgagggtatcacccaaaagctcgctgttgcgcacatggacagctgtctccaggctttgaccctttacctctgcctgtgggcggatgatctccatcacgccgtccacaagctttctcacagaaaagcgttcgtagcttaaggtcatctttccgctttctatcttggacatatccaggatatcattgatcagccccagcaaatgcctggatgaatatccgatcttattcaggcaattctccacactctcccgtttatccagatttgcctgggcaatcgcagtcatgccgatgataccgttaagaggggtacggatatcgtgggacatattggaaaggaaggtactctttgccgcattggcattttgagccacatccagggcctgaagcaggcgctcatcattaatcttttcatccgtacggtctgagagagtcaaaatgtacttctcactggaatccaccagttcatgataaagaatcgtacaataccagcgccgctctcctgtccttcggttcatacggtagccatccctgcgcacattttctcccacggggatctgttcccgggccgccaatacagaatcctccttggccagagtttgttccagcacatagatatccgtgcgcacctgttcctcagggataccaagcaggcgctccacattagggctcacatattccgccttacggccatcagcgccgaacattacgaatacatcatccacgttgtttgtgagcaggtcaaagagctggtcacggtatttcagctctgtgtccttcccgcgtataatacttcggctcctgcgcaccaggctgtaaataaccatcaaggataaagcaaggaacagcactgcggccacgatcatggtcaccatgcgaagctggttcatattggcattgactgtatccttaggggccaggcccagcatggtccagtcttccaggcccacaggaagatatacgagatagtaatcctcattccctgcacgaaattccaccatgcccctatttttgctgcgcacatcagagcgcagtgtatccagtgtgccgtacaggaatttcccgttctccttaaggtaggccagataattaaaagcgacccttttctcatcctccatgctggccatggcaaccgctccattaggctccacgataaagcattcagccgtatagtcaaaggcatttatcttcagtagatcaaccaacatatgctggctgtatgacacagcaatggcccgcacctcaaaaccgctgatcaatttttcctggacaggcactgcaaataaaaaaattggagtcccgttgctcattgtattgctgcctacgatctgctcctgttcattcatcagggtaaaaagactgtctcccaggtcaaaatatcctgtttccatggagagcgagaggtaatttccatttttgtccagaaaataaaagtcattgaatccccatgcctcttcctgctgctccatataatccttgagccattcccagccttcctcgtccgcgcttttttctaaaataaagtctctccagctgttcagggcatcccaggtacgtgataccacactggaaaaagtcgtatttacctgggaaaatatctcttccaggtgctgcgcactttcgttgcgtacctgtcgtgtcatatattgggtataaggtataaaagtgaccatgatcactgccacggccaccagaaacagcagcactcctgtacgcagctttttgttcatattgatctctcctgtttactccagaacaatatagtcctccggcttctttggtgcatgtccgtcctggatatatgtattccatattgcctgcaggttctctccctcaagcttggtcatacgttcactgccgcccacaggctcaatatctgaaccttccgcacctgctttatttgaatagagaagggtgaacttgtcatcccctgcaatttctttgccatttcttgtaatggacgcaagctgaaagccctcatccccctccttcacgtgcatggtgatgccgctcaccaagggaagacgattggcagagggcgagctttcaaccatcctctttaccatggcttccaactctgctccggttacctcaccagaaaatacggcatgagcctgtacaggcagacctaattctgccaaagtctgttctccggaatatagaccacagttcactgaatagaagggcattaccaaaacatccgcaccttccgcctgacgtatggtattggaaatacaggagccggcttcattgccctttttctcatcccaatcaaaggaataatccttttccagctttgctgccttctcctggtccgttgtatctggctctgacaacactttattaaaggcatcatatgcctgggatgcgtcatactcgcctgtgaggattttaggaaatacgtccagggatgccttgaaaaactcattggaggcaatcctgatataaatatggttctgctgcacaaggggctccatcagtgccatctcctttggcagctccagagaaatatccttgttgtaggatatctgtgcgccaattgtcttattaagaatgttctgggcatccgcactgtacatggcgtccaacaccttgagcaccagctcactgcggctgtcctcctcattgccttcctttttcactgcggtctggaataccgggtaagtcagcgcccaggtttcctcctgcgtgcttccaaaatagggcagtgccgccacatccaggtgatccctcttaatggcctcagcagcgatcgctcctgtgcctcggatcattgccacttttcccgctgcgaaatcctcatttaccatatagtaatccagttctgtatcctcaggcttcataatccctgcttctaccagctcctgaacccgctcaaatgcattcttccagatcacatcatcaagtctgtccgttatcttattctcatagtcatgacgccaggtccttccctcaagggaagaaagagcctcgatggacaagccctgcaatatctccatacaggtataatcgtaggcatagtcactgacaacgcctcggatgcctttttcctcaaaggccaggcacgcggaaataaagctgtcataatccgtaggaaggggcacgtcatattcctcaaacacggccttgtttgccacaaaattgtcaaaaataccaggcgccggcagccagttcacggagtcgtcctcattgcggtatttatccagatagattgaatggtaggacgcagccagctctgtctcgttaaggtccataagactgtcctgcagctggtacgcatccagaagtgaaaaacgacggctggtcataatatccggcaggccgcctttctcctggagatacaggtagaaatccagactgtttttccccacgctccactcaatatccgcgtcggggacctggctttccacataatctgtataatctcccagaagattgatatcataaagagaaactgtaaccttattctcctttcccgtcttaccgccgcatcctgcacaacatacaaccgtaagcagtcccagcgctgaaaggactgctgccttaccaaatcttgtcatactcctactccttctttacactaccgtattatttcccgctcaactgctcacgatcctactgagttattgtgcatatgggcaaaaattatcaataaaattatagcatgaaaattatccaaggacaagtccatgccccaattctcctctccctcccccaccttacacattacagttcacacagtaacgcaaaagagccgcggcggactgttttacgaaaatttagtcttgaaaaatgtgtaaagatatggtaatatttctcgtgtggcgattttgccatataagcccagatagctcagttggtagagcagaggactgaaaatcctcgtgtcgctggttcgattccggctctgggcatacaccaaaagctcacagcacacgttgtgggctttttgttttagtacaatctaaaaaggaaaggatgtttttaccatgaaaacagaaaccaaatgcctccattccggttatacgccgaaaaagggagaaccctgtgcacttcccatttatcaaagcacgacctttaaatatgataccactgacgagatgggccagctttttgatctgaaggcagacggatatttctatacacgtctccagaatcccaccaacgatgccgttgccgccaagatcgccgacctggagggcggtgtggcagctctgctcacctcttccggacaggctgccaacttctatgccgtgtttaatatctgtgaagccggagaccatgtggtggccgcctccaccatttatggcggaacctttaatcttctgggtgtgacctttaaaaaactgggaatcgagtgcacctttgtggacacagatgccagtgcagaagagatcgctgcagccttccgccccaacaccaaggttttatttgcagagaccattgccaacccggccctggttgttctggatattgagaaatttgccaaggtggcccatgagcaccaggtgccgctgatcgtggacaacacctttgccaccccggtaaactgccgtccctttgaatggggcgctgacatcgtgacccattctaccaccaaatacatggatggccacggccttcaggtaggcggctgcattgtggacagcggaaattttgactgggatgcctgcggggagaaataccacggactcaccactccagatgactcctatcacggaatcgtgtacaccaaatcctttggcaaaaaagcctacattaccaaggcaaccgtacagcttatgagagatctgggctccattccctcccctcagaactgcttcctgttaaacatcggactggaaactctggtcctgcgtgtggagcgtcactgtgagaatgcccagaaggcagcagaatatcttcacaaccatgaaaaggtagacagcgtgaactttgccggacttcctgatgacaaataccatgcccttgcagaaaaatatctgcccaagggtacctgcggagtgatctccttcaccttaaagggaggccgtgacgccgccgtgcgctttatggacagcctgaagctggccaacatctgcacccatgtggctgcctccaaaaccatggttctgcatcctgcaagtcatacccaccgccagctcaatgacgaacagctgaaagctgccggggtggatccgggaatgatccgtctctccgttggtctggagcatattgaggacatcctggctgacctggagcaggccctgaaaaacgcttaaaaatcaggcttacaatttttataagcctcatagtataagcctcatagaatgatgcaagcgcacaagcctgcgtctacacttctgaagaacttcacagcccccagccattgcacaaacttgtgcaggctgggggctgtttgtattcttgctgtatcatcattcctctaaaagatacacgtctgtgtagaaggttcctttggacaggccttcctcatgggtggccacatatacgtcaatgcagttgtccacaatagcgcctccgcagtcctccgccacatatacctggccgttgatcaccaccttgctgccatagggaatctgcttgggattcacggcgatggtgcggttggtggtggcccttgtgcctgtggctgtataaccgttggaaaaggccccacagcagatactgcaggcacagtaatgggtgatcctgaatttgcccaggctctttaaggtggcacttgaggacacggctatgggctcgcccacctgaacgcctgtgacggccgtggcatctccctcctttacctgagtgactccgtccacagcttctgcaaaaataccggttccactgcccttgtggagggtcccggcttcctcgcctgccaaagccacttcaacctcctgaacgttttgttccacatccagaacgtcagtgggaacataacccaggtggttttttccttccccgtcctggtagatgatcctgctccacacatcattgatgacgcctgtgcgtattacctggtcatcctccagaacctctcccaccactttgccgtcctttctggcgggataatccaccacatcggaatctgacaaaacggaaacggtctcatccaccggctctacctgcttctgctctgtcaaagcagctgtctctacaaacccggtgtaggtatcctcatttaaagtgagagtcaccttgctccagccattgtcgcacacagaggtccgctccagggcggtgccataggcagccttgcgcacctctgccgccttctcatctggattttcccggaggacggcggtcttgtccttcacatagaggtcgtcctgcctggcaagcatcttcactgtcttacttcccttttgtgtcacctgctcaggctctattttctgattatcttgttttaacgcatttacagtgtcttcatagtccggcacagaagcatgcacattggttgaaaatagcaatgcggcacaaagacacatgctgaccagtcttctttttttcattggcacttcctgctcctttatccttatttcccctatctataaccgaaactgctgttatcatagcacaaaagcggctcctttgcaattttagctccactattttagtctttttttagaaaatcatgattctaatatcatgaaaaatttttttcaaaaaaggtattgacagttcctggcttttacgatatactcattatcgttgcagggaacgagaaaacaaagttccaaagcaaacatctgcgggtgtagttcaatggtagaacactagccttccaagctagatacgtgggttcgattcccatcacccgctctcatgaaaatttcatgaatatgcgatagtggcgtagttggtaacgcgcgaccttgccaaggtcgagaccgcgggttcgagccccgtctatcgctcacaggactcttgagagatcaagagttcttttttgttgcataaaaaggaaggagcatctgcctccctaagttccggcagatcttcaccggacttttctttgcagctgctccctgtttttttcttaattctcccactcccacacgttggtggcctccatgttctttctcggagttttgatgaccagctccgggctcttggcactgaccttggtgttggcggggactgactcggtaatgaaggtatttccgccgataatggcattgtctccaatcaccgtctcccctcccagaactgtggaattagaataaatggtcacatgattgccgatggtggggtgacgcttcacgtcagagagctgctgtcccagtcttgtggacaaagcccccagggtaactccctggtacagcttcacattgtttccgatctccgtagtctcaccgatcaccacgccggttccatggtcaatgaagaaatattccccaatggaagcccctgggttaatgtcgatcccggttcttccatgggcgtattccgtcatgatccttgggataaagggcaccttttccaaatacagctcatgggcgatacggtatacataaatggcgtagaatcccggatatgagaagatgatctcctcccggctcttggccgcagggtcaccgtcaaagcctgcctgcacgtcctttaaaagcatctgctggatatccggcagcttctcaaagaagcctgcacagatctcctgtgcccgctcctgaagctcctcccagtttttctcattgcactgatataataaagcaatataaatctgctcccttaaccggtcatagagatggttcagcttatagcctgcgctaaaatcaggaaacagcgcctgactgctgtcatttccaaaatatcccggaaagatcacccgtttcagttccctggtcacctggatgacctctgagcggtcgggaagcctctttccgcttctgggaagaaaaagctcttccttctggtagctttttgtcaaggcttccacggtttttaagatcgcatcctttttcgttttcacatttttccgtcctttctgtcatttctgccggctttgtacagccgttcctgctccctatatgccttcctttggctttctggccaatacagccggaaagcttgggaactattggaacagggctgtggaatagtaccggtccccggagtcggggagaatggccacaatggtcttgcctttattttccgctctttttgccagctccacactggctgcaagggcagctcctgaggagatccctgtaaggatcccttcggttttccccaattgctgtgcccagtaaaaagcatccgggccctttactggataaatttcatcatagatggaggtattcagcacctgaggcacaaaattcgccccgatcccctggatgggatgaggaccagccttctctttggccagaacctgggagtcatagggctccacagctaccacccggatggcggggttttgttctttaaggtattcgccagttcctgtaagggttcctcctgttcccactccggccacgaaaatgtcaacctgtccctgggtgtcttcccagatctccggtcctgttgtctcccggtgggcctgggcattggcaggattggaaaactgtcccggtataaagctgcctggaatctctgctctgagctcctctgccttttccacagcaccggccatccccttgcttccgggggtgagtacgacttgtgctccataggccttgaggatgttgatccgctccacactcatggtatccggcatggtgaggatcatacgatagcccctggcggctgccagagaggcaagtccgatccctgtatttcccgaggtaggttcaatgatcaccgccccgggcttgatggcccctgtcctctctccttcatccagcatggcccgggcggcccggtccttcacacttccagtgggatttaaatattccagcttcagcagcagcctggcgggaagtccgtgcttcttttccagggcgcaggcttccataagaggggtgcctccgataaattctgcagcagttttatatattttcatagtggtggtactcctttccagaaaaacgaaacagttactttatcacattatcatattactgtaattctctttcgtcaatgagaacttgacttttttgtaattcccgttataataaattacgttggtatctacatggagatatacccaagtggctgaagggtccgcactcgaaatgcggtaggccggttctccggcgcgagagttcaaatctctctatctccgttatctgcacaaaaggtgcgccccatccaggggatatgggggagacaggaagagtccaacccatgacagcaggcggctgcccggtatttgccggacagccgcctgcttttcatttcatcaaggagatccaccgcttcaaagccgaagctgctggatggacttttttacgcattctggtcttctgtatgctctatggacgcctcaggggcatttttctgcacgctggcaattcccttctcacagctctgcttttctgtgtacgcctggctcacagccacgatctggccgtttgaggcttttaagtggaagcggaactctccttttgcatccttaaaaatttcaaatttgggatgatgaaggctggtaaaaccttccacggtctggtcctccacaaccgcagagtccgcattgtgctgtacactggcaatccccttcagacaggccgccttggtggtgtacacctgggaagtggcaatgatctccccattggctgcatgcaggtcaaacttaatccctgtgttgactttttttactacaaattttcccattcagatacctcctttgttctactgtttatactttagcacaaaacagtgaaaaagtacatatctgtcctccatttttatacttttatctacatttttttctcctgtacaggattcacatggaccatacagtgcttcacatttacaaaggcctcctcaatggcgtggtggacattttctgcgatctgatgggcctcatccagggacagagaaccctgggcggcgatctcaatatccacatagattttggagccaaacagccgtgtgcggatcacatcaatgcgctccacaccctcttgattcaaaatcacctgacgcatctcctccacagtctcatcacagcaggaatggtctaccatcttatcaatggcatcccggaaaatgtccaccgccgcttttccgatgaaaatacagatgaccacactggccagaggatccagcacaggaaaacccagccgggctcccaaaatacccacaaaggcccccactgaggataaggcgtcagagcgatggtgccaggcatctgccatgagcgccccagaattgatcttcttggcccctgcccgggtataccaaaacatccattcctttaccacaatggacagtattgccgccgccaggggcagaagaccggggatcacaagattctctcctgccgtaccggccaggattttttccagtcctgccactccaatccccactccagtgatgagaagaaggcctgccagcaaaatggaggagacgcactccagccgctcgtgtccgtattggtgctccttatcggacttcttgcctgagagcttcacacccacaatgaccacaaaggtgcttactacatctgaggcagagtgcactgcatctgacagcatggccccggaatgccccagaattcctgccaggaatttaaaaagtgacagggccacattggcagcgatgctcacggtggatattttcatggcaagccgctgctcctgggcattggcttcctgttttttctgtttcagtgtctgttccatgatttgcctcctttaaaagagaattggatacttctgtggcagatacctttttgccttttcttccagggtgctttttctctctgtcttatattacgtggaagtatcaaagagtttcctatgcagggcgggagggaaaaaaagcacacctgcggaacattccactgtcccacagatgtgcgccaaatcctccacatccgctgcctatttccatagacccggctctgcagccggaagatccttccttcgctgccgcctgctcagtttgtactgttattttcgatccttgggaaagatctgcagtacaaataaaatttaatacagaatactatattctaatttccttgtcaacccttttggacttcttgaatttttataaacaacttccatcctcttcccggccggagcaaggtgtacataaacgcagggtataagaccggtccatgatccccatggcttccagggtctccagcatgcggtatactgtggccaggccaatctgaggatctttttttatggcctcataataaattgcttttccgctgctgtattccccttgtaaaataacctccagaagaacaagacgttgttttgtgatccgtaaattcctgttcctcatctcttttataacatggtctctgctccacatggtgtctcattcctttcctggtgaatttctgcaattaaggcatctgctcaatggacaccacagaaaaacccgctctttccacagactttattacagtttcccgggatatctcctggtggcaggatacaacggcctgattttcactgagatttacctccccttcggctccctgaatctggttcaaggctgcttccacggtgtatttacaatgttcacagtgcattccacaaatctttacaaggtaccgttttttcacagctccctttcgtttcttccggggttttacaagccctttcgtacctccggagcagcaggccccttcccctttaaaatgtctggcggttccccgaagggcaaagatcaaaagggccagcaccgccaataaaataatcccgtcaatcattttactaaatggcgacagccgctgcaaccggagcagccagaacaacagccgctacagccttcacctgctcttgccttcttcccttcattttttatgatccaggcactgtacaacagaaccagtgcagatatcagtaagtttgctgccataatttatctcctttcctccagacgcactctgggccgtgtatgaaaaaactctttgctactgtaccgcctggaccgaacgtttggaataaagctttttgtttttatagggatcttttctaaacagcaggaaaaggatcaaggccagaagaatcaaggccgctgctgtccaaaggccaaagcttcctcccaaaaagagggaaccgatctgatatacgcacaggcagattacgtaggcaaacacattctggaacacaatggcaaaccagaaccactttctggactgcatctgctgggccatggtggcaatggctgccagacagggggaatccagaagattgaacagaaggaaggagaaggctgccagagcccctgggaaccaggtctgcactgccgctgccacggttaactcatcttccaccagttctgcatttacattggccagcacgcccatggtggacacaatggcctcctttgccgtaaaaccagacagggacgctgccactggctgccactgaccaaatcccaagggtgcgaacacaggggcgatcaggccgccaataagggccagaatgctgtcattgctgttttccaccattccaaagtgaccgtcagcaaagccaaagccgcccaggaaccacatgatcacacaggccaggaacaaaatggtgcctgccttgataataaagcccttcagcctctcccacacatggagaaggactgttttcacagaaggaagatggtactggggaagttccatgacaaagggcgccggatctccggaaaagggcttggtcttcttcaggataatggcggaaattaaaactgccgcgatccccaccacatacatcaacggcgccatcaggccgcctactgcataatttccggtggtatagcccaccatgacgctgcccataaggatgatcaccggaagcttggcaccgcagggcacaaaggtggcggtcataatggtcagacgtctgtcgttgtcattttctatggttttggaagccatgatcccagggatcccgcagcctgaggaaattaaaagtggaataaagctcttgccggaaagtccgaaatgacggaacacacggtccatcacaaaggcgatgcggaccatatagccgcagtcttccaggatagacaaaaacaggaataagatggccatctggggcacaaatcccagcacagctcccacgccgccaataataccatcagccacaaggcttatgatcaaaggagaagctcccgctccctccagcagactgcccactccctcctggacggcggctacaaaggtgtcatttgtccagtctgtcacaaaggttcccacggttgcaacagaaatataataaactacaaacataacagccagaaaaatggggattcccaaaaatctgtttgtaacaatcttgtcaattttgtcggagagcgtaagcttttccttgggtcttgtcactgtgttggataccagcttctgaatatatgtatagcgctcatcagtaatgatgctctccatatcatcgtcccttgctttttccagtgtcttcacaaagttggcagcctggcttttcacagccccagacagggtggtctcttccagcactttggtatcctgctccaggagctttatggcataccagcgcctttcctcctggggcacacagtctgtaagtttttctttaataagctggattgcatcctccacatccttggaaaacattgaggaaggcattttccaggtttttttccgggccagagaaacggcctcatcaatcacctgttccaagcccttccctttcagggcagaggtctggacaatggggcatcccaactgccggctgagctgctggatatttacagaaatatgattcttttccagcagatcgcacatgttcagggccaccaccacgggaatccctgtctctaggagctgggtggtgagatataagttacgctcaatatttgtggcatccaccaggtttatgatcacatccggtttttccttcagaagataatcccggcttaccacttcctccaatgtatatggtgacagggaataaatccccggcaggtccgtgactgtcacctggtcctgcttcttatttttcagctttccttctttcttttctactgttactcccggccagttgccaacgtactgattggcccctgtcagggcattaaacatggttgtttttccacagtttgggttgccggcaagggcaatgcggatagccatatagatccctcctctaatttcttttagttagtcatagttaacttccgctgttaaaaaaattggtcctactgttcattgaccaacacacactgagcatccgcttttctcaaagaaagctcatatccccgcacagtaatttccaccgggtccccgaaaggggccaccttgcggacaaaaatctcacttcccttggtaatccccatatccatgatcctgcgcttataggctccctcgcctataattttcgaaaccataacccgggctcccacttttgcatcacgcaatgtcattctctctcctccttatatgctttctgattctgtccatttcccatgatcacacgaaaatatgtctggccacgtcctcattgatggccacacgggaatccttgatgttcacgatcaaatttccgttgaatttagagatcacctgcacctgcgcattttccacaaatcccaaatttgccagaaaccggcgggtggcatccccaccgcccacacgtctgatagaatttcgttctccttctctcgctatggtaagtggcattttcctctctccttttttgaaaatgaaattcattctcatttgtctctttacagtggtattatatccttgtttccagttattgtcaactaactattttgtattttatcgagaacaattgacagataggtttcaatgtactataatgtgcttattcaataagtacattatagttcaaaaggatgatgctggtggaaatcattattagtagtaatacaagcaaaccaatatatgagcagataacttcacaaataaaggcaatgatcatgagtggggaattaaaaaccggcgatcctattccttctatgcgctcccttgcaaaatcgatccatgtaagtgtgatcaccgttcagaaggcttacgaagatttgcagcgtgacggttttattgaaaccaccatcggccggggaagctttgtgtctgcacaaaataaagatttttatcaagaggagcagcagcggcgggcagaagaacatttgcaggaagcagcagaaatcggcagagccagcggaatccccgttgaaaaactcatggagatattaaagctgttttaccaagaggaggattgattatgaaagacaatgctttaatcataaatgggttaacaaaaaggtatcgggattttgttttggatgctgtttcgttccatgtcccccgtgggtcaattgtaggattgatcggcgaaaatggtgcaggaaaaagtaccaccattaacgccattcttggcttaattcaaaaggatgctgggacagttacaattttggataaacaggaacaagaaattgattttgccacccgaaatcaaatcggcattgttttcgatggcaataattttcccaatacacaaacgcccaaagatctaaacgtactgttcaaaagcatttatacaacatgggatgaaaagatatattttaccttactggaaaaattatccttaccattcaataaaaagatcaaagcattctccaaaggcatgaagatgaaattatccatcacggttgctttctctcatcattgtgaacttttaattttggatgaagctacgagcggacttgaccctattatccgtgatgacattttggatatgtttttggactttgtacaggatgaaaaccattccattttagtttcctcccacatcaccagcgatttggagaaaattgcagattatattgttttcatccataagggcaaggtagtattttttaagcctaaagacgaattgaaatataagtatgggattctcaaatgcggtgcggcacaatttgacaggattgataaaaaggatatcattgcctaccgcagacaggattatgaatgggacgtattagttgccgacagagccgctgcccagaagaaatatcccaaagcagtgatcgatcctgcgacaattgatgagatcatgctgatttatattaagggggaacagccatgaaaggtatgttgaaagcagaattattcaaattttttcattcctattccttatgggtgatcatcggtgtgttggttgtctgcaacagcatttctatcatcacaggcacctacagtaatgcagaagctgcactgaccagtttaagtaaagatagtatggttcccattctggcatgtgcggtttatagttcgatcatcttaacagatgatttttcaaatggcctgctgcggcattatatttcaaatggatactcaagaacgtcaattataagcgcaaaatttattcattacatccttggctgcagcattttgctccttgtctacccaatggtttgcgtttctttagccgccatcctacaaggagttgaagcttcctttgtatctgttattaaaaccctgctttttacatttataaggacattgccattatattggggaatatttagcctattttttttattttccatttggatccaaaagggggttatcgcaatgggagtttctttggcctcatcaattttgattgtagtatttaccaacaaattttatggaaacggaacaaatatattaaaatatactcccgttatacaaatcaatgagacagcccaaaggactactgacgaatactttatctctgttgtgatatcattggttattcttgctttgtgctttttgggcagtattataaaatttcgtcatgaggaattataaaacgaaatcccccgcctatgcctcttgggcattaaggtgggggatctcttagctaaaatgaactattaaaatcaagcttttccaactgatccgaataattccattttttctttcacagttgctttgatggcttcgtagccaggtgccagaagcttacgtgggtcatagccctttccctgctggtctttgccctcttcaatgtatttgcgggttgcctctgcaaatgcaagctggcattcggtgtttacatttaccttagatacacccagggtgatggctttcttgatcatgtctgccgggattccggaaccgccgtgaagcaccagaggcatttccccggtcttctgctggatcttgtccagaacctcaaagttcaggccagcccagtttgccggatattttccatggatattgccgattcccgctgccaggaaatcaacacccagagaagcgatcttggcgcactcatcgggatctgcaacctctccgccgcctacaacgccgtcttcctctccgccgatggcaccaacctctgcttctacagagatgcctttgctgtgtgcaagagcaacgatttcttttgtcttttcaatattttcttcgatgggatagtggcttccgtcgaacattacagaagtaaatcctgcgtcgatgcaggcttttgctccttcatagctgccgtggtccaggtgaagagctaccggtactgtgattcccagagattcgtccatggcttttactaaagcagctacggtcttgaatccacccatatattttccagcgccttcagatacgctgatgatcaatggtgatttctgctcttctgcggtaagcaggatcgctttggtccattccaggttgttggtgttaaagtgtcccactgcatagtggcctgcttttgctttttttaacatttctgctgcatttactaacatgagatttttacctcctactctttgttggactcagctctcatttgctgaaaatccgataacatatagtttagcagattttttctccctcgtctactgaaatttgacaatcaaacaaggggatggagctgttttctgtaaaatgtacgttttctgtacacaatcaaaaaatggaaaaatatacaaagaaaaaaagcaaaaaactcttgcattctatttctaaatagtttataatcaatttcagttttggatggattcccgagtggccaaagggggcagactgtaaatctgttggcaacgccttcgaaggttcgaatccttctccatccatgatttggcgcagacaggggtctgcgtcatttttattatataattgcataggaaaagtatacggccctgccaaggcagggccgtaaatcatttaggaacgatctccactttcgttgcccattccttttgtcaattctttctgggcttcgttgaaggcatctgcttttcttctctcccactctgtcgccttctcatattccttaggcttgttgataacaacctgagggaatggaatgttaatgtcgtgcttgtcgaagatgatcttcatctcacggttcaggtcacgcatcacctggattctgtcagactccgcacactgtgccacgatcttgatgtttacactgttgtccccaagagccaccacgcctttgtagaaggggccgtccttgatggcaggaacacgtttcctgatattgggaagctccttggccaggatattttccacacgctccagagattctccgtactcaatacccacgtcacaggcggcataggaatttctcctggtcatgttaatgactccgctcacatcactgttgctgatgatctttacgttatttcccggatcctcaatcttggtggtgcgcacgccgatttccacaaccgttcctctccagtctccgatggtgacaatgtcgcctacccggaattccccttcaaagataataaacaggcctgccagaatgtcagatacaagggtcttggctcccaggccgatcaccagggataagattcctgctgaggccagaagtgtcttcgtatccactccaaacagggcaaagcaatagtacaaaattgcgatcacagatacatatttggaaaagctgctcacaagtctgcacacggtttctcctcgtgccccaaaggttttggagagaatctggaggatcttgcggaagatcatcacagccacgctgaccacacagataatcataatacagcctgtgatggcaaacacattgacacccttttcccattttccattgagcacatacaggaaaatagaattgctgtcaaagaactggtctttaaataatacagccccgcagatagccaaagccagcacggataccaggccctttagaatggaaccgatcttctgctctggtgtcttttctgcccatttcagggaaaggttggaccagcggctggcagcagactctgtctttccgatcctgccgtcaggcatcacaacatcgatcatcgggccgtctttgttttctttgcctgcctctgccacagactcctgctttctgccaagggtgaggatcaaaaataccagcagcaggcagatgagactggcggctccagtagccagaaccacagggatccggttttcgctcatttcctcatggggaatgaccacataaatataatccgtatccgtctccagacaggtaccgtaatacttctgtccgtccacatttatgtaatcattgtattcatcccggaactgcttctcttccattccatattccatgacatccctgcccatatatttctccttgggataataggagaaggtcttgtcctctttatttactgcaaaggcaaagccatttgttcccaccttcacgccctttaagacagaagcgatatttgtggctgacaaagcttcctccagcttgtccggggtgacggagatctgtacaaaaccgtctgcatctccttcttcatcccgcatcacagcgccgatatactgatggtacaccccggaaatctcatccggctgggcctcttggatcacatactccacaccctgaagcagctttccgaattcataggactgttcttctggatcctggctcacctgaaaattggtgtatggagaatccgtctccgtaactttgcccttgccatcaaagatcagaatgaattctgcatccagggccttggtaagctcctgaagctctgccttggtgtgcagcttgggattttggctgagaatatcagcggcaagctgcgccttgtttaaatatcttcggttatattgggaagtcaccagctccatctcttcctggtttctcttgatattctcccccacttcctcagctctttgcatattgctcatagagtgctgggaaagagagaacagggtctgcatatagaaggacacaaccaggatcacaataagccccacaactgctatagctccgatttttctgccaatgatcttatcaaagaaaaacttgttgaaaaccttgtaattctccggctttgcctggccgttcttctcaacttccgccatcatcagaatggcatagacgataacaatggtgatcacgataaagaagataaacagcacaatacccactgtgatatttctggatgccgtgatctcgctttctggaactgcacagataatataggcattttctttctctatatttgtgattccgctgtagaaccgctggccgttgatgttcatccactcgtagttattatcctccagctcctccacatttagacctgcaccaagagcgtccgtgcccaccagactttcatcgggatggtacaggaaggtataatcctggttggacacagcaaaggtataaccctccagtcctacgcttaccttgcttaaaatacttttccaggaagagatgctctccacaagctggtccagctcctgtgggtcatgttcaatgaccgcctgagtattctcatcaattttcgctgcataatagcggcgtttctgatctccgatcaccacctcaaagggttctgagggttctccggtatcaaagactgtgcgaagctgattaaaccggtcataggtaaaatctgccgccgacactgcacctgaagcgatctggctgccgtccttgtccagtatgagaatgttggtcacattcatcctgtctgccagctctctcatcttctcgtctgtggcagaaaaggtttcatccttgcgggccatgtaagccacggtggctgcctttgactgataaacctcatcatagctctgtgtactctgctgcgcttcttcctctgcagcatccaggattccctgcatctgctgaattttttcctttgtatccttatgctgctgtgttatggacagatctgtctgcagcccggtgaggaaaatccccagcgccacaatacataaaatctccaccacaaacatgacgatggctttctttttcaatctttttgacattttctgactcccccctaatcccatttgtcaatcaatcccgcaatggtgccgtcatccagcattttctggatggattctgccaccggtttgctgagcttggagcccttctgagtcgctacaccataattttcctcatgaagtgtctcatctaataaaatggtatcatcatccagataggctctggcaatacagccgtccatacaggcagcgtccactgttccctcctccagagctacggcaatgtccccgtaattttcttttctcacgaaagtaactgcgtcaaaggtctcattgtccacctctgggatcagccccagctccaccagcttctgggcatacacaggagccgtgttggcgccgtccagaacaccgatcctctttcccatgagctcctccatacttgtaagcatggaagatttctccaccatgatcctgctgtaatcggaataataggctggtgaaaaatcgaagttttccaggcgggtctctgcaatggaataagcagcgatcaggcagtccacatctccatccagaagcatctgcttacggttatccggctccacagttacaaattctacctccttgtagcccaaatcatctgccagcttgttggccagatcgatttccagtccatagtactttccagtagtgggattcaaatacccaaagttcatgatgtcgtcacgaacacccaccttcagcgtcccggacttggacgctggcccgcatcccgcaagaaccgcagatagtatgaatacggatgacaatactatgctttttctcttcatctcttgctcctcctatgttttctccccctaaaggcatctacaaaactctgagacctgcaaaaaagcttctcaatggacaacgggctccttctttggccagaaggccaagggagctggataccataaaaaagctgcagatcgatcacttcagataaaatccaacaaatttcgtaaacacctatagattgttagacaaattataccaattttagccagtaaaagcaacttaaaaactatactacaattaaagaatttaactcctttcctgcaatacccttcaacttccctcatgcatcagcgtctgaactgctttacgagtcaacagacattaggccaatatatagctgcaaagcggctttacccgccaatgttcacctgcgaagcggttttcccggcaaaaaaagactgcccttgaaaacattattgtaaaataacattttcaagggcagtctttgaacccaatcctctttatctctcatctctgtgatgaaggatcatcacaccatatcttggcagggtgacacggataactccggccttagccagataataatagggttccgtggaaaacccatcgtggtaagaaagcatcagcccggtaaatctcacatctccggaacggctgatcccagttccccagatttcaatatcctccgtgcgctcatgatcatcattgttaatgatcaccacaatctgctctgtatgggaaaaacggccataggcaattgcctgataatcattccacaggaatttcacagagcctgcccgaagtacacggtacttcttgtgtatacggatcatttccttatgataagcgatcaattcctgatcctcatttccccagggataagtcctgcggctgtccgggtctgtaaatccgcacacccctgcctcgtccccataataaatagtgggcgctcccggccaggtcatctgaatggccacagcctcccgcatcactgccttattgatgttttctgaggcagcctgagctcctgcataggaaatccttcccacactccggttggtcctggtgagaaacctggaatggtcatggttggacagctcgttcatggctgtgtacagggctcccatgtgaagggtctccatatgatttttcatggctccaataaaggcttcactgtttcccagcaaatcctggcggtactcatcgctgtgcttctccatgccggtcaaaaaccaggtgactggctccatgaaagcatcatagttcatgactgtatcccactcatctccctgaagccagccgtcgggatttccatagtgctctgccaggatgatagcatccggattggcacttttcacctctctgcggaagtccttccagaactgatggttaaattcattgctgtggcccaagtccgcagccacatcaagacgccagccgtccgcattaaaaggaggcgacacccacttgcgtcccacctgcagtacatagtcatacagctccttggagccctcataattcaattttgggagagtatcgtgggtccaccacccgtcataggagggattgtaaggccactgactctcatcattaaatttgaagaaataccggtaagggctgtctgcgcaaatgtaggcgcccttctcgtatccctcctgtttctcgtaaatcttctcacggtccatccatttattaaaggaaccgcaatggttaaacactccatccaggatcagcttcatgcctctgtgatgaagctggctgatcagctctgccagaagctggttgctggcctccagattccttttatccgtcactcttgtaatatatctggaggcatgggtattgtccttatccccttccgccaggagttctccctcgtccaccacgatcttcccatagtgagggtccacatagtcataatcctgacagtcgtacttgtgattgctgggcgagacaaaaataggattcagatacagcacttccacgcctaaatcctgaaggtagtccagcttgtcaagaatcccctgcaggtcaccgccgtaaaattcccgcacgcccatcactgccggaaccttattccagtcctccaccttcacgctcacatcgccgatataggagtattctctggtctccacatcgtttgtgttgtctccattatagaaacggtccacataaatctggtacattacggcgcctttggcccactctggtgttttgaacccgggatagatggaaaagaaatgttcttccacaggatgcatggtaaccccctggaaattacagtagcagatgagccagccataatggatctcaaaatagtacttataaatttcttctcccaccgttattttcgcagaataaaaatcaaagcccttatggctttgtgtcacccgcattttaattttctcatcctcatggaccagataaacagcatctacgttatttttctgggtcctaaaacggatcgtgactgtatctcccggttccggttccactggtgaacggtaatattccgtggcatctgaaaagagtgcagccttgttcagcacaggcctcatgtttaaaatatactgcaatgacattgacggatctcttttctcattctccataaatctacgttccccttttgtattcgctcccttcattgtaacgtaaaaccgggaaatatacaacatttttcccagaaaagagagcttctctttctatcttatgataaacaggagcctggaaaatcaaaaaattcctctcccataaagaaaattccaattgtcacaaaagcctgttcttaagctttcctttttcggctccccttatacatcttccttccaatccttcgctttccccaaaaattcaaagtaaaagagccagcgggataggctggctcttttggagaaggtatttcttcttatggggtgtagcaaaaactatataatgtattggggggtttttacgatgtatataataccatgaggcaacaaaaaagtgtgcacaaagttcacaaaaacgggcacacttttttggttattttatataccttccgtctcagggagctgttctgcacctgtaaaaagtgcctcaaactcctctctgtggatcttttctttttgaatcagcagttttgcgcatgcgtgaagcacactttcatgctgcaaaataatttgctttgcccttgtatgacaggactcaataatgttccttacttcctcgtcaatggcagtggcaatattctcgctgtagcttctggtatgggccaggtcccggccgatgaacacctcgtcctcatcatttccgtagttgatcagccccagcttctccgacatgccgtacttggtcaccatggacctggctgtggaggtggcccgcttaatatcattggaagcgccggtggtgatatctccgaagatgatctcctctgccacacggccgcccagcaataccgtgatatcctccagcatacgcatcttggtgttgaacatctcatccttctccggcagaggcatggtataacctgccgcccccattcccgttgggataatggagatggtgtacaccggacccacatccgggagcacatggaataaaatggcatggcccgcctcatgataggcagtgatcttcttctccttgtcagagatgaccttgctcttcttctccgcaccgatccccaccttcacaaaggcactcttaatatcctgctgcacaataaaggtccgtccctgcttggctgcctcaatggcagactcattgagcaggttctccaggtctgcccctgtaaaccctgccgtggtctgtgcgatctgggtcagatccacatcctcggccagaggcttatccttggcatgtaccttaaggatctcctcacgtcccttcacatccggacgtcccactgccacctttctgtcaaaacggcctggacgcagaatggccgggtctaaaatatccacccggttggtggccgccatcacaatgatgccctcattgacaccaaagccgtccatctccaccagaagctggttcagggtctgttctctctcatcatggcccccgcccatgccggtgcctcgctgtctggcaactgcgtcgatctcatcaataaagataatgcagggtgcatgcttcttgccctcctcaaaaaggtcccggacacgggaagctcccacacctacaaacatttccacaaaatcagagccggatatggagaagaagggaactcccgcctccccggcaatggccttggccaaaagggtttttcctgttcccggagggcctaccaaaagcacacccttggggatcctggcccccaccttcgtatatttctgaggcgccttcaggaaatccaccacctcttccagatcttccttctcctcctggagtccggccacgtttttgaaggtgaccttcttctcgtcaggcagggtcatgtgggcccggcttttgccaaagtccatcatcttgcctccgcccccacccccggacatctgtctggtcatgagcataaacatgccgaaaaacagaacgcccataaggataatgggaagaatgctggtaagaaaagcgctttccctctccacatcatagacagtggggctgatgcccttgtccataagatagttttttactgcatttacatctgggtcaaaaaattgtctctggtctccgtccttgaggacgaccacgatacggccggtgggcacttcccggttcatatagattttcaccgaggaaatatcatcgtccttcacagcctcctccaaagctcccatagaataattgctctgcatggtggcctgtttattcaaaaacatgtagccgccgatgagcatgaccagcatcagcacatacagaccaattctacttggttgtttgttcactttttaaaaatctcctttcagtccatttccagtacgcctacaaacggaagatttctgtatttctgcgcatagtccagcccgtaccccactacgaagtggtccgggatctcaaagcagcagtaatccaccttcacgtctctcacacgccgctctggtttgtcaagaagggtacacagacgaaggctggcaggatttctggatttcaggttttccagaagatagctcagagttcttcctgagtcaatgatatcctccaccacgatcacatccttgccctccaaaggctggtccagatccttgacaattctcaccacgccgctggatttggtgtcgtccccatagctggaaacagacataaagtccagggataccggcacggtaattctctttgccagctcgcacataaagaacacgccgccctttaacacgcagatcagatgaactgattttcctgcatagtcacggctgatcctggcgccgatctctctaatttttaaatccacatcctcttcactgatcaatacattgattttttcactcatccaattttcctcctttgtagttcagttcaagaattcttttggtttgttcagaaacctgacagctttctcctctccggccgccgatcacccacaggatctccgggccccaggccaccagcttctgagcatccctttgttctcccggaatcttttcatctatgaaatagcggctcagcttttttctgtctccctggacatttaccaccaggtagtcgcccggccgcctggaccggatacacaacgttccttttattttatcataatcaaaccatttcgtatactttttttcaggaatcttctcatcttccttgaaaaaaactctggcttccaaggtccccctgccaaaatccacacaccccggcacgatcagcgcctgctcctggctgtttacctgtgtacaggccttggtttcttcctttttaaagagaagccctccataggtgcggtggacagaaatggcatagggaagccgcagcctgcgccccacctgtctgcctgccagctcccggatctgccggaaatgctctccggtaagatccttctccctgcccgccaggtctgccaggattcctttgatcaaatacatctgtaaaatctccggctccctggtgaatccctccttcaggaagatcccctcctggctggtgaggctccattcctgtgcaagctctctgctgtgctgttccagatacgcatctgcctgagccgcgatggcggcaagctgggccatatgtgccacagcctttggattcacctcccgggtaagggtttctatgacctgatgacggatccggttccgggtatagtcatccagaaggttggtggaatccgtctcatagggaatctggttctccattaaatattgctcaatttctgccctgtctaaacataaaaaaggacgaatatagggttcctgcactggtttcatggctcccagcccccgaaggccggttcccctggccatgtgatggatcatggtctccgccagatcgttggcgtgatgggccagggcaatgcgcacaggaccacagccctgctttttcagctcctgggccgtctcttcaaaggccaggcggcgcacctgtcttcctgcctcctcaagtcccagcttgtccctttgtgcgatctctgccaccctataccggaacagccggaagggaatcccctcctggctgcagattttctccaccaaggcagcgtcccggtctgcctccgtcccccgcagcccatggtgcacatggaccacaaagagtgtaaaatccagcctctccctgagattctttaatacatgaaaaagcgccatggaatccccgcctccggatacgcccacgatcacggtgctgccaggagggatcatcccatgctctctgataaaggcctctgtctttcttatcatgctgactcctattttttccacattccggccaccagaacagtcatgtcgtcccgggccttataatcactgtatcccaacacccgctccagtattcccctgctcactgctttgggtgtctcctcctgcacatccagtatgatctccttcatggtctcctctgttttgtcctgaggaagggcatccagcaccccgtctgtgaccatgatcagataatctccatgatacagcttcctggatgcagtctcaaattccagctgctgcataagtcccagggccagattggtggatgtgatagcctccacccaatgatccctgcggataaaagtggtggccgccccggccttcaaaaactggcagatccccgtgtacagatccaccgcacacacatccatggtggaaaagcgtccgtcctgccgtttcagcaccaaagcggaatttaccatcctggctgctgtctcctgggtaaagccagagtccataaattcctccagcagctccaccacgatctcgctctcctggctggcctccagaccagagcccataccgtctgacagacacatgacaaactggccgttctcctcctggcggcaggtatagttatctcccgacaccttctcctgctccttggtgatcctggacaccccatagaggatctggtagcccacgtcctccacaaactgcacggtgtggtaatccccgttcacaatgcaccggctttccctggcagaggtcatgggacatccgcacacctctgagagaagctgggatacctcaggcacagatacgcactggccgcttctggcccgcatggtgagatagacctgcctgtggccgtcctcccccttatccaggatccaggcctgcttcaccagcacgtggcgttttttcagcttcctggtgatctcctcctgaaacgcggtgtccgcaggagtaatgtcatacaaatcctgggccaccattttcatgatcccagaaatttcctgcatctgctgggcaacagccagacgcccttcaatcatccggttgtcccacacaagattctgcttttccttctgaaagctcttggccgcacattcccagaactgtccggccctggcgcagctggccatccaggcagaacgcgcctggcggatgggttcttcctctccctcttccatggcccggatcagccctccggccatctggtaagtatcctccacctgctctccccagcagcgttctcgttggtaacactgactgcagatctcatcgttcacactctccaatacccggtccacctggtccttgctcagataatccttcctgtagggcatgccgtaaaaggtatctgacagccgcttaaatgcctgggcgtagcgctccacccgctccttctggggatgctcttccggcatgagcgcttcgccccttcttttctccgcccttcctgccaaaatagtttttgccatgtcccgaacgatcagcagtgcgccgactacgagcatggcaattatccattcctgcatatattcccctcccctaatgaattctcattaaggagatattataaaggctgttccaaaaattctttgtcaaaggaagggctccctgtataaaaacttttcctcagaaattttctttattctgcttcccggaacacaatttcattttctttgacaagccccagcttctctcttgccacagactcaatatactcatctgtctccatgtattccttgatgtcctcaatctcttttgtacgtttggtctcatcctccatctgcgtctgcagggaggtgagcttcgtgttataatctgccagccttttctccaggctctggccctgaaccacgaatgtgcccagcagaagaagggcgatcccgctgatcaccagcatacccacatgattcttattctttgatcttcttcgccttcttgactttttcatgttccctgttcctttcgcctgccggcttgctgcccggtgtgtttttccagactctgcgctttattttatacattaaaattctacaacgtctctctaaaaatagcaaccgttttgataaaaaagcaaaaaactttacagggatttctaatatttttaaagaaattgtaataaatttggcttctgccgtcgatttccacagggcagatcccagcaaaatggcagcaaacacgtaaaatcgaacaattccgtcgttttcctggtaaatctggcagaaaacatagataccgctgcccacccaaaacaaaacatcctccgcggctatgagaaagtacccgtgcgggaacagcctgcgcagcacctggagtccgtcatagatcacagtgagcaggattcccagcagcagggaattgagaaacagcagtatttcatggttcatataagtactcatgggagatcagcggaacatccgcttccaggcagattcctcccggggtccggcgtttttctggctgtacagaaggctgtctactctgccgcttagatccacctctcccttgtccaggtccagccggctcacatggagattctccccctttaatacaatcttaccgtattctgtgagaagtaaaatttccttctcatcaaaggaagacacatccttcactcctgtgacggttcctccctggcgattgctcaggatcactttatgggatactgcattctttttctcttccaaggcacactccatctaacctgttttcttctttcattttatgtgccgccctggatttctagtactttctgaaaaaattacagataacggtacaggttttctacctcttccttgcgcaccgtctctttcacgtccaggacctccaccttcacattgcggctgccgaactgaatctccagtacgtcccctgctttcacctgggcagatgccttggccggcttgtcgttaatgagcacacgccctgcatcgcaggcctcgttggccactgtacgtctcttgatcaatctggatacttttaaaaacttatctaatcgcataatcttacttcctttctgtttggtcgaaaaaagagggaacaagactgttccctctaatcatgtcaaaacattgttcaacaattatttgctgtttaccatatcttttaaagcttttcctgctttgaatttcggagctttagaagcttcaattttcatggtagcaccagtctgcggatttctgccttctcttgctgctctctcgctgacttcaaaagtaccaaatccaaccaactgaaccttctcaccatctttcagttctttggacacaacatcgatgaaggattttaatactgcctcaacatctttcttagccaaattggtttctttcgccattgctgcaactaattctgttttgttcatggtgtttcctcctaatatataatctctttcttatgattgacaagtactgaaagctccctcatagtactctatttttaatttatataccttttgtctgttattgtcaaggattttccttaaataccgggcattttaaccgatttgtggacctacagcatagaatttaccattgccagtacatccttgcccatggactgggatttttcgtctgcatcggcaagggaatttcccttcacgccatagtagaatttcaccttaggttctgtaccggagggtcttacacacagccatgcgccgtcggacagatcatagtaaagcacattggaattgggaagtccggttggcttcacttctcctgtggccagatcggtgatggtgtccatcttgtaatctcttgctttcaatactttatagccgcccacttctactggcggttttccacggagggtgtccatgatctcctgaatcttctgaagtccttcgattcccttcaaagttacggactggatatcgtccttataatatccgaactcttcatacatatcgatcattgcatcccagagggtctttccctgggtcttataataagcagccgcctcacacagggccatagtagccacaatggcatccttgtcccttgcataggttccaatcaggcagccgtagctttcctcaaagccaaagagatagcttcccttgccgctgttctcaaagcccaggatctgctggccgatgaatttaaagcctgtgagaacctcaatgagtctggcattatatttctcagccagcccgtccaccaggttggtggtaacaatggttttaatgagagcgccgtcttctggcaggccgtacagctctttgcgctggctgatctcatagttggccagaaggcttccggacatatttccagtgagtgtatggtactctccatttttgtcttttacacgaacgcccagtctgtctgcatccgggtctgtggccagaaccagatctgcatccacttccctggccagcttcaggcccagctcaaatgcctccgcggcttctggattgggataagaaactgtggggaaatctccgtccggcagctcctgctcttttaccacatagacattttcaaagcccagctccttgagaattcttctggccgggatatttcctgttccgtgaagaggagaatatacgatcttcaggttcttgccctctttctcaatggcatccatgtggagaacctgcttcttcagctcagcaatataggcatcgtcaatagcctgtccgatcacttcgtagaggccggccttaacagcctcctctttgtccatggtcttcactgtgttccagtcagagattgccttcacctgggccatgatcccagtgtcatgagggggtgtgatctgtgcgccgtcttcccaatagactttatagccattgtattccggcgggttatggctggctgtgatattaatgcctgccgcacatcccagatgacgaactgcaaaggaaagctctggtgtaggtcttaaggattcaaaaatataggctttgatcccattggctgccaggcacactgctgcctcctgggcaaactcaggagacatgtggcgggaatcataggcaatggcaacgccctggccctgcttgttcacagaagcgatataattggcaaggccctgggtagctcttctcaccacataaggattcatgcggttggtaccagccccaatgatcccccgaagtcctgctgttccaaattccagatccatataaaaacgctctttaatttcgttctcatcattttcaatagccttcagttctgcctttgtgttttcgtcgaagtaaggattgctcagccaatcctgatatacctccttgtaatccatacaataagtacctccctataccatttattttcctctattatataacaaaactgtaaaaaaaggaattaaaaccaatgctttcggaagcatttttttccgaaatcttcccaggcctgcctctggcggactaaaacctgaagtttttccacatttttcccggagatccaggctttattatgggaaaaatagtagttggcaagcttccaatatttctctgggtaccggaaacgtatctgcagattggtgcgctctccctctgacagcggccgcctctgttcatactgatccagaatgtcctgagcaagtcttctgtcccagttgtacttttccagaattttccgcaggaacttatacagatccgctgtctggatgtcataattccaatgggcaaaattggtgacagccgtgccatcttttagtatgagtacattgtgctgattgtattccccatggcagatgctgcccctggcacgggcctcctggcggagctgcccgtagccggaccggcgcagaagctccagggcctcttctccttgttccagaaagtaatcggcgctttgcaggtacaatttttcaaaatcattggctgcacctttctttctgataaacttgcagattttgcgcagctcccggttatggcgttcatactcctcttctaaggacttcatttcatagtcttcaatcaaaggaagatgcatgacattatgtaaatcagccattgcggcagcgcttttcttaatgtcctgagcagacttggtgtcacattccctgccctcataccacctctgcagggtataggaggctccgtccttgtccttgctaagaagtccgccttccagattttccacgaaaacatccaccttgcaggtgctgttgtccaaaatactctgaagcagctcctgctcctgggacagctttttcacggagccgcaaaaggctctcagaatatagagctcttggccttttctgcacagcagcgcccctcttgtccgtcttgtctctgcctgttccaggccatactgtggtaacacacttaacccataatcgttcaatagacaactccccctccagtcctatactttctataagtatgttcctggagggggagttatgtttcacttatttctgttttttacgttttaccgttacagcgcctgccagcgcggctgctgccacaagcagtgccagatacagaccaattggtgtatcgtctcctgttttcacagatttgcctgtgggattaatggtattcaagctggtggggctggaaggattggacggtgtctgaggtgtgccgcctccttgtggtgccggagtgggtgtcacactctggatgggtttgttcacatatttcagaacatttcctttgaagatcacatccaccgtggaatccactgtgatgttattgtcctcatccactgtgatggccacatcttcgccgcccttataacctgccggcgctttcagctcgcttaaggtatactctcctggggtaagctccataatataggcgctggcctcagaagtccattcttccacaaccgtaccctcggcgtctgtcatctggaattcagctcctgtaagggccattccatttccgtcaattttctggaccgtgagtctggctgactggctttcctcaggtatggtgttcacgatggaaacagtatccctgtcgtgctcgccgcttaaggtaacctttccttcgccggtgacttcatattcaaatacatccaggtctacaggctcccctgtctcatcactttcaaatacatagtaggtaatgggatccttgccctgttcaccgcctaaggcaacctctacggtcacggttccgttctgagtcagctctaccaccttatacagattgtaaataccgtcttcatctttggtataaatgccagcgtagaaggtatcatccactgtagtttcgcttccgcccttcattacctgcttatttatatccagataagctctgtaagctgccccgtcggggatatcgtaataaatattgttcaggttcactttttcttccacatcctgggctttcacattgagttcaaccacgctgtctgagtcatctgtggtgcacatgaacatttttcctttggcgtccgcaagaatctcatcgtatggaatgggggttcctgtggcatctgtctcaaatacatagtaggtaccggagggcagattgtcaaaggtcacaacacctgtggaggcattctccagcttcagagccttcactgagccatatggctgggttccttcctcatctgtgaacagtcccacatagaaggtggcatccttcactaccagatcaatcaggttcaatccgtctgccagagtcacacgcttggtaacggagatcttacccttctttcctgtgtcaggaatatccttcatggttacctgaatatcgctttgctcctcactcaccgtgaacttcacatccgcagccacctgatatccggtgggggccttcagctcggtgagggtataggtctctcctgccgttaagactttctctaatacatggggagtcccgttgctggtccattttgcaaccacattgcctttggcatccttcactgccagctctgctcctgccaggcccttgcccttttcatctaccttctggatacttgccttggtgggcgcatccttcatggtaactgtggtggccttgccggcgctgtctaccttgaattcaatgtcctcggccatccaatagccgtccggggcgctgagctcgtggaggatgtaggtggtgtcgacatcaagcttgccttgtactgtatgcggtttgccgtctgtggtccaccgttcaatttcttttccattctgtgtaagaatctggagcactgctcctgtaatctcggtcttgcctgttaagtcggtcttgctgatggtcacaccggtaggtgcatccttcatcactaccttggttgtggttccgtctgaattcacagtaaatacctgatcctctgccagcgcataaccagtaggcgcttctacctcccgaaggatgtatttctttcctgcctctaccttataagtaactttgtatggttcattggtggaggtccaggattccaaaacctttgtgccgctctcatctaacagctgcagcttggctcccggaagctccttggtaccggacagatctgtcttggaaatcagaaccacgttcttagcatcccacatggtaatcttcatttcatttccttccacagaatcttccttcactgtaaattccatgtcttttgcgtaggcatatccttccggtgcaaatttctcatggaggatataagtctttcctgcaatgagttttccttctacatagtgaggcttatcggtagtggtccactcttctacagtttgatttgtttccttgtcaatgatttgaagaatcgcacctggaagttcatcttctccggtgatgtctgtcttgcttactcttacacgggtcttggcatcacgcataatgactttgtctgtttctttgccatcgatgatgaccttgccctcatcattgagagtgaaatcaatgtttgctgccttaccataatatggaggcggtgttacttctaccagggtgtattttacgtttacgcttaatacgccttttatctctttgtcctttccatcttctgttggccatggttcaacaactgtgttgcctttctcgtccacgatcttcagtgtcgccccgccgattccggtatctcctgtgattgctctcttgctgaccattacctcggtaggtttatcggtcatggttatggacactgtttctgtaagctcatccacagtaaattctacatcttcggcaacagtgtagcctgctggcggctgtacctcgtgaagcttgtaggtttcaccagcttttagttttgctgtcagtgtatgctcttcggctgtggatacccattcctcaacaggcttaccagcactgtccagaatctggagcttcgctcctgcaatcaagttccctttctcatcgactttttgaatttttacttgacggagtttatctctcataacgatgacaaccgttttttctggttgcttgtcatcgtctgtggcctttacagtaactgttccatcagcatttacacgaaagacaatgtcatcagcttttaaataaccatctggaacgcttttttcacgaagaacatattcctcgtctgtcacaagtttatcacccacgtacattggtcctggctctgtaccagaaatccagtgagttattaaattaccgcctttccaaatttcaagtgttgcccctggcagttcttcacttccagtaatggctcgcttgcttacctggatattattcttgccgtccctcatagttacttcctgcacaaattttgatacagaaattccttcagtgggcttgcttacagtaaatggtagatctgccgcacaggaatacccttcaggcgcattagtttctcgaaggatatattctgctccaatcttaagattttcaacaatatatggtttcgtaccggaagtccacgtttttattggctcgtctataaccacacgaacttctttttcttccttagtttctggatctatttctactttcttttctacaggatgtattgccaatgttgctcccggaagttcatcttcacctgtcaagccttttttacttatggaaacttttaccgggtaatcatacatggtcaatgggccatcaactgcttcattatttaccagaacttcccccttattagtaagagtaaattcaatgtctggggcgagataatagccctctggtgcctttgcttcatgtaacttataggttcctgcagcaagtccggttatcatcttggtggttccgtccgtcgtccactcaacatctataccatataaatcctttgccaccttgtcttctgaatctaaaatctgcatttcagcgcctttaagttctctgttcccttcccctgatacagcttgctttgaaacgaccacctctgttggttcatctctcatagtaactgtctgtacacttccatcttgaaggacggtaaatataatatccttggccaaagtatatccgttaggagctgccttttcttttaagatatatgactcacccggtttaagcactccacgtataatgtgaggctcattttcaggttccccagatatccacttgtcaattgcttcaccagttggctgaccttccttatctacagcatatacttccatttcggcaccgggaagctcatctgttcctgtaatagatttctttgagatttctacatgggttacaacattcaatgcagtaaagacattatcctggcctttgataattgaagtatacccctctggtgtatctacttcctcaacagaatacagaatttcatggtcattaacttcacgctctaaatctaaccatgtatatttccatacatctttgtccttggagcctttaattgtaatgatatctcctactggctgttctttaccatactttccgatatctatatcccattcttgtttatataactggaatttagcctgcgttggtctctcctcggacccattatctctccaatatttcatcaaaaatacagaagttttcgtagtatcatagctgttcttaacataacatacatcccaagctccagaatccactgttgatccatcttttttgtattcataagatactttgtaggtttcatcttcgaactttgttaattctttaactgtatatttgatggcagtagttgtatcctctactttatcttttttaagatttactggcagctgactccagatatagctccaattattatcttcattcagagtcactgttcctttataagttacggtttcaacagttccatcctgtttaactactgttatggtataatcctctacaggctttccatcggcgagaagctggacttctatactatccggacgctcttcatgtttagcgccatccaaccacaatttctcaacccctaaatcagtaacatcaggagtatgctcatttttcaaaacaaattggtatgtctgagttgtcgggtcgaaagtgccatatttatcatcttcatactctgtggtttctgtatatttatcagaattatcaaagttagttaattcttttacataatactttatctcctggccatgattctgatatttgtagaggttcacccagccatttttccagccattggactttccgagtttcaaaacagcattttgtttatttccatcttcatcatctggaacacttcctacaggactgccctctgattcacctattttagaataaagctggacttcaatttcagccggacgatacccatcttggtcattggcatcactccaaatcttttctacattaacctttactacttcaggcatatgtttatttgttatgattatcgttttatccttgctgtctgcggttaccttatcctgactataagttggactctcataatatttatctgaatccgtaccgtttttgtaagtcacagtctcattaatagaatattcaagtaactttccattctcatatgcaggaagatctgaccaaataacctgcaaatcctcgtcggttgcatcctctccttcaaatttcctagattcttttgtggcccatgctttcgtatctacagtgcgatatcgaagctcaaacactatcgactcaatatacttcctaagaccatccttgtctccaagatcgtcccagaatttttttgcttttatttccagtttttcactaccataggtgtttttaatttttataactggatttgcaatttctcccgtaacgaaagcatcttctgaatcattgtatgaaatagtaaaccttctctcctcatttcccttataggtaatattctctattaccctatagcggaccaatttaccattctcatatttattcagattcgcccatgtttttttccaatcggtcttaattaattcctgcggtacatcataaacagcattttcagactgttcattaaatttcaccgtactatacgcagtatacctaactccatcatatacagccttttgtaattcaacctgaatcttatctattgaatctctaagtccatcttgattctcagagtcatcccatactttattcacactaactgatgtcttctcagattcataaccattagtaataactatcttacgttcttcatcctctcctgtaacataagccggtttgtaagatggggattcatatactcgcgtttctccattcttatattttacctcttctacaattccgtaacggattaattctccatcgaaatatttaggaagattattccactgaaccgtccaattggttttaatctttccgccaacaattgtttcggatttcccagccacatcctcaaattcctgataattgccatttacctttttggacgcctggagttttacggtaatatcagtaattgtatctcgcataccgtcctgattctcattatcatcccagaatttttcagccgatatatttgtaacagctggtacatagctgtttttaattgagatactattatcttcattaagaccttcaataaaatacgttttatcggaactgttataagttgttgtatactgccgtgcctcgcctgatacgtattctatattttcaacaacccgatagcgaatcagtccgccaaatgcatatttatcaagattctcccatgttttcttccaattttccttaaggttctcttcaggaactgtataagtttctacatcctcataatccgaatatccgtttccttgtataacagatttttttaagactaatgagatagatttcacagaatttcttaacccatcagaatcttccccatcgtcccaaatcttattggcagtaattttaaccttttcatttaacggtatattttcaatggaaaattcccactgttccgtgtctccggccttgccttttaccttagtatgttcacccttgtaacccgttggtacgtcttcaactactgaataagtaatctttttcccagattcgtatacaggtaactcattccaagtatatgtccaacctccctgctcatttaattgaacaggattacccacctctacaatgctggcttctccctctaactgctttttcaattgcacagttacagaatctggtttagaagtatcgtttgcctgccaaactttgctaacctttacagaagtctttttagggatataggaatttttaatgcttaccgtatttacacgattaccagtttgatctaaaccgtatactccatcactctcggcaaactcaccatcaccattattatcatactgcacagtatattcagattctggatctctctcaacttcttcaaccttataaatgatttccttaccctctgaatacttacgcagattattccattcgccttgccaggagttactgggtttcaactggatagttgtttctacattttttccatctttatcaacgatagtagtaatgggtttattttctactgatgcacttagctgtaccttaatagaattcgggcgtttgccatcctggttatttgcatcatcccaaacttttttcactttaagattaatgatacctgtattatgtgtgtttgtcagcttaaatacggtcttatcagcatttggggttacattccaactataccctttatcggcattattaatgggaatctcaacaccatctacagtcattttaatctctttgactgtatattcaatctcgttccaacgattattctcaaacttatatttaggaagattctcccaggtataagcccaattacgtatttccccatcaatttctttcgtattactctttagcagtaccacttcggaacctacattactattatcagcagttagctggacagttatatgtggatcttcttttcgaagtccatcaaaatccacggcatcattccactctttgtataccgatactgatttaactgcttggtttgttattttaatagaatcaccaattctgatcacatcattcccagcgctattggagactgtaaatgtaataggttcttctaatagagcatatccggcaggcgcctttgtctcctttaatgtaaaggtatcgcctggctccattgcgaattcgccattagcaggatcagcagaagccgcttttgttacatctggattctcaccaataaaattattactggttgtaattgtcttcgttgcaatgggttgacctgataccgaacctcccttgtaaatttcaaattctgctccattcaatctgttattttcattgtctgccgcacacttattaatatatacatatcttctggagccagtcatggaaccgccgctatcttttttaatttctaccttattctcataagatacttctatggtagaagttccaattataaagcttgctttattttcatatggaacactaacaatgtcatcaccctcctgtgatctaaaaatcaccacatcatattcaattttataagtatctccgtttccattgggaatcgttacagtaaactgctcccggccatctggtagattcgtcgttgaaaagctatactcgtttttatcaactactacatagctagttccaacctttttagaaactctaagagtatccggatcatcctccttatttttctgttttaacttcatattagaaccaagtgtatcagtcacagtataagtatttgattctggtggataattcttaccttcttcgtttaagaggagctggaaagtagcagtatattcattatcatctgttggcgcaataatttgagatttactgcctattgtactgggaattacctgagtactgctgccgcttcctattggtgttccgcttgtagtactcacttcaactgtatttgtgcatacctcatttgtgggatcctttatagagtcagctatcttcgtcttatattccaacgaatagttaacacctggagaataaaaggcagatatattgctaaactgaattttattttcgcttatcttttctgccaccggataacctatcttgactccactacgatagagaacagcactatcgtcaacatatatcatattatttgaaaatgtatctacaatattaattaaactattgaacccttctcctaaatccaccgtccaagtaaatgttttgtttgacgaatcatatctgccattctttgtgatattacctttttcaatggttgtcttatcccaaccagactgattcttaccatcttgtattacagtaccagtattactgatatctcctccttcatctgacacttttgtataataggttataataatagtagctggtcctgtcacactaccaaaatcgatagtaaaggatgtatcggaatctcgggtaaagtttggagttactccttctggatatcctgtgatatcaatatgttcataaccgtttttatcaattcccatgttgacaggcaaggtatggtttcctgctaaatagtctttgtataccactgactcaattgtactatcaggaatataaatctttgtctgccattttgcatagccgtctcctgctgcctgagtatcatttacgaattctttgttgatcgttttgaatcccactgcgcctgcaggaattaatacagaagacgaatctgaatagccatgtattttagatatattagtataggtatgctcaatcccctcttcacctgctggaactgtatatgttgttttatagctaaactcgtaggccgctttcgtatcaaagaaactatcattcattgtatacgaccagcttcttccatcatttcccagcactacttctgaccactcaatagtgcgggaatcatcgacaactaactctcctgattgattcttggtatatttcacaactattattggtgtttctaaatcatagaaaagaccattttgctgcaaactatcagtcaatgtttcgcctttaactattacatccgcatttggattaacaacaactttccatgttatttttccatcatctgatattccagcattactttttttgatccatgtatgtgtataactggcatctccatttactataaatcccttatcactattatcataaattgttgcactgttacccgtacctggaatcaatccattagatgtcttcagaatttcctcaggaattgcagcagtataagttatcacatacttatctccagccttaacctcatcaaatgtaagatcaaatccgtgattagttatattggctacgtcatatccctgctccaatttcagcccattcttattcacagtgatactactagaatccagtaccaaatttgtgcccatcacatctactatttttacgttttttgaatctccgtcagcatctatataaatattaaaagtaaaccttccagtttccgtattaaactcggatgcttccttttttgcgctgacatttacatcatgctttacgtgaatagtaatactagcgcctccaggaaattgaagctccacttctttttcattttggataacagttttattaaatttaagccaaaagtatatggaacctgtacagttatttgctctgcctacttcctctgtaaaaacaactacaagattatcatctttgaaactataggatccaaatatagaatcctcagaatctcctgcaattttaccaataatgttgccgctttcattttcgtatccagtcacttgagcaggcattttgaaactcaatggtactccaactggaaactgtttaccactagactcttttaaataaatttcaaacccaaagtatccgttatctgcaaccgggtgctgtgcatcaaagccttcattattactaatcaccatctggaaacctttacctgcaaacggcccattctcaggtttcgatgtatcaagataatctgctaaatttccagaagacgcagcttctatactatcagctttaagttcttcatcattcaaattgtcattaagcagactacgctgtcctaccagcttagacattctgagttgtttctcattaagctttttattttctggcttaacatcgattactttattctcacttggttcttctgtttcctctttattttcatcagtaatttcttccgttgtatcttctggtgtttcttctggggtttcttctgttgtctcttccggagttccttgtggtgtttcttctgtagttccttccggtgtctcctctggggttccctctggtgtttcttctgtagttccttctggggtctcatctggagttccctccggtgtctcttctatagttccttctggtgcctcctctggagttccctccggcatctcatcctgggttccttccggggtctcttccggtgcagggctttcagctggaactaacaattctgtattataccatgcggctgaacatgcgctgccatttacaaaccaagcacagtcaagtccggaaacgtcagtaatgccctgggcgatctctgcggtaaaggtataggctgcggtctggcctgcggggatctgctggtcaagccacatgagcacattgccgttgctatgggcattgattacatcctgagcgacttcatttaaatggaagcctgggtttacacttacatagttgttgatatcggccgggttattgaagccggacattcccggggtctcattgccggcaacatagtacatctgctctggaaggagcaccttcacggacacgccggaggcagtattttccagatcgttattggtgacctgggcagtcatctgaacgtagttgtgtacgacaccgtccatttcctgctgatagatctgctgagtcaccccaccggacacatttgccgttgtctgggtctgggactccgttgtgtcagcatcgtctgaaaaatcctcagatactccgccttccggaacatcctgctgatcgtttccaggtgtttcttctgcgggcgtactgggctctgactgagtctcaccagctcttacatccagctggtcctggctgggagctggctgttctgcggtgtactcgccgcttcgcatgtccagatcctcctgcgtcacatctgccatgatactccaggcattctgggtaatcatagccatggccagcataaccgctaatattctgcgccatcttctttcttttttcatagcttacatcctcctgattcttattatttttcttagtcttaacgtccctttaccggactcttttttaaaattgatataagtgcccataaatactctaggattatcttcattataaagaagcgcacattatcccaaccattacatttatttccttttttaatttcctacttttcttttttttagcagaatttttcaaaaattcccacatctttcatttctattttacattccactatactatatgtagtaattttgtccatttttcacagaggactctctcctcttagcccaagctgccttctccttgggctgagatcttgattcttgatgtgcatggcagctttccttggcacattgtgtgtatcccccgaagggtttttattacatagaaaattcaggaacttttctatgtaataaaaaaaccattacttttacattcttgtttgtaaaagtaatggtttctgccatgtgtgaatgctcccatttccctatgtatccctgtccgttctatacctttcaggaaattttataacagcttcttttctactcacagatccggatactgtttctccacctcatgaacgcttgtcatggagaaattcaggcttgcattagccataggattttcctggaaaaatctcttctggattctttctgtgacaatatctattttatcctctttggctccaatcagaaaaatcaggaactgacagggactatattttgtgaaaaagtcccccttacgcagggatttctgaacagtgaccttcagagaatccatttccttctcgattttcttctgacgttttcttacgtctccctcgtactctctcagagtacacagcatcaagcccatgcttttatcgcttcgctctgcgattctgtttaatatccggcaggaatccacaaaactgagaagattacagtaaaaagctcctgtatccatactctgctcttggatctgtacgcggatatcctctatgttttctgtgtttccctgcacctttccgctcatcatctggtataattccagcatttttttagaaggtgtaatacccaactcgttcatatacaatctggatgtagtattatatatttccaacgcttcgttatattgtcccatggccatcaggcagtctatctggtaaagctgccactcctcatatggataaattctgcttgcctgatcagaaaactccaggatctctttatattctccctggcgcttcattgtggtcagaagttcctttaatgtatttgtgtacgcttttttataggaagagccctcgttgatcacccattcctctgcccccagcaaggggagaaggtctcctttgtacagacggcaggcggccttctggaaatcttccttttcttcctggctccccgccccacgggctttttccaaaagctccatgaattcccctgtatctgttctaagagggatctggtccgtccaataataacatctcttttttatttgaatataatcacactttggcaggccgctgtctgccagcaatttctttaatcgatagtgtgtaacccgaaggctgttagccgggtcggataattcatacccctcaaacaaatattttacaagctgctccctgctgatcccctttttccctctcagcaaaatcaactgcagaaactgcatgatttttgtagctgaacctatggaaagatttaatggctcctgattccaaaatatttgaaagctccccagcatacgtacatataaataattattttctgctgccaccctcaaatgcctcctctgcttttatcttcatttccgaaatgtattaggataaactcactaaagcaaacaataacaccttgttttgcttcattgattttaaatttactgctgaaaaataaagtgatatccagtcactttattttttattgcaaacccttacttggcaaaaaagtttgctctagctccccttggcaaggtagaacacatctctccataatattctgggaactatttgtccagccgctttttttatgatactcttattctttcttcaagaaaccgcctgctagctccagcagcctgctcttctcgttcttgtccggttcttccagcacctcatccagcagacaactgaggatttcgccgatctggggccccggacggacaccaagcccaatcagatctctgccagttaccgccaggtttttcaaggatacgcactgcttctcttccaagatcacctggtacagctcctccacctgctccagccgctccagcttttcttccttataatagtcactctgagccaggaggtctgccctctgcacctgaagatacatgggaaaaagctcctcccctatgcggttcactgctctgcgcacatattttccctccccaatgggccggtaatcatgatattttaccaaggttttcacctttgagatggtatcattgtccatcttcagacgtttcattatggccgccgctgtcttctctcccacctgggaatggcctttgaaatgatcccggccattttcatcaactgtccggaccaggggtttccccacatcgtgaagaagaactgccagacgcaggaccttgtccctgggtacttccttgagtgcggcaagggtatgttcacccacggtatagcaatggtggggtgtattctggggtgtagccatcatttcatccaattcgggaagaaactctctggtaattccggcttcataggcagtccgcagataatccggatggggggaaaccagcagttttaccagctccacctgtatcctctccgcactgacatttctcagattgggagccagggccgaaagccccttcacggtattttcttctatggtaaaccccaattgtgcggaaaaacgcacagcccgcagaattctcagggcatcttccgtaaaacgctccatagggtctcccacacagcggataattcctttctccagatccttcaagccctcaaataaatccaccagcccggtctcctgattataagccatggcgtttatggtaaaatctctccgcttcagatcttcttccagactggccgtaaaggtgacctcctttggatgccggccatcctcatactctccgtccacccggtaggttgtgacctcaaagccctcaccgcccataagcaccgtgacggttccatgctgcagaccagtgtccacagtacgccggaacaaggcctttacctgctctggcttggcagacgtggtgatatcccagtcatcgggagtccttcctaaaatcgaatcccggacgcatcctcccactgcatatgcctcatatccagcctctgtcaactgactgagtattttctccacatgttctggaatggctaaaatcatctgaccctcgtctccttatcccctattttcctgcaatcttatttcactctgctaatcagtatagcctcatttttgtctctttgcaagttcacaacaggtatttttgtctcaccggcccattcatttaatgtgatttgtttacgcaatttatccacattcgcaaaaagaaagtatccgactgtccaaatggactttttatctgtcggatactttcccttttgcgatgaattctttatatggcgatatgcaagattggatggaggatgtatacgccatagggtacaccataattagaggcataatcctttgcctctgcaaatagcggatcgtacacaaggccattgatctctgtccagcagtggccgctgcctcctgctccgtcagagtccacacacacataaatcttcgtatatcccaatgcttttgccaggtaagcaaaggcagaagcgtctgcattacagtcgccgcctcccaaaaggaaatggtcattggcatacacagcgggccagcctggtacattgctgaaaatcctgcgggttatgtatggcttggagatcacccaatcaaaacaggccttcagtttctgtgccttattcatcttactgttggtgatcttagccacaagatttctggctgtgactaaagtaaggtaatcctgaaccttgatgctgttcatactctttcccgtgccatcatagtaggtggtttttcccttggaatctaccaccttcatttccacaacgccgccgtcactgagataataggtggtatttcctatctttttcgtgcccttcaggagatatccgttgtctccaatgagatacgtctttcctcctatcttctgcagcccggtgcgccgcactccattagggccaaaataggattttcccttggggagctgcttccatccggaatacatggtgccgttgggtctgaaataataatactttccgctgatcttctgaaccttgtcccggatcacgattcctttggaatcggttctgtatttcttggggggcctggtgatccagatatttttctggagataccctttttcattaaaatagtaggtattggctcccagcttgcgaaagccccgtatcagctttcccttctggtaatactgcatctggccttcctcggttttgttccagccgtccttcaccgtctgtgctgacacgggaactgccagaagaaggcagcatgccaatatcaggaaaagcagcttctttattctcttcatatccattcctccctggttgaactccaggcgcctgccctttggtgtgcgcctggtattttcccatacccttatatcagcttttgccgctgatcggcaagagcctgaactttcttaatgccgttaaacggcttcagcccccagcacaatttctgtaccggttgtaggtttgaacagggttactttaaagtttggataatagaggatcacatcctggccgtctccgtagcagctatccacatactctgttctttgaggctttcctaaaagcgatctcaggactgcagcctctgcctgatattttgaggcggtacgaagctttttactctgggttatattctgctttccgttggatgaaaaagcatagaactggttattgatcacataagttccagtgagcatatggccgttgatgtcaaaggcatagtaggcggaaccaattctttttatgacagggaccgcctgtcctaaaatatttttacttcccgtataggcagcaccgttggcaccgaaataatatttgtaggtgagcgcttttccgttggacttaattttcacagaacggaaggtgttttttgccttctggttccctatgtaatagtaatatttggaactttccttgaccagaccggtcatttttccggtggtcttgtgaaaggcatagtaaatgttgttgatcactgcgtttcctctgagcatacggccgtacacgtcaaagccataataacagccgccgattttcttgaggactggggttttcacacccttcacgatctttcctgcataggcggcgccgtcttttccaaagtagtatttattgatgacggttttgccgttgctggtggtccttacctctttccaggtattcttggctctgatgcccttcacatagaaatagtactttccattttcttttttcaagccctcttttacagaggtctctgccgcaataaccgtctccgccatggttactgctggtacctgcacacatagcaggcacaaaagtactgcaagaatctttttccactttttcattgtaatctccctcccatatggataaattatcctatgtatttttcttaattatagcatatggtgattgagatatctacagattccggggataatgtcagataataattgtttggtattcgaagttttttgttcctatttcagtggagacctattactgccatttactatgtatatataataggaagtttcttttcagaaaaacgtctctgcaaccgaaaagtccaggaaattccctttgcttttactgagaaaattctctttgcttttactgagtgaggagtgccctttgctttcgttcttttggcttggggatcccaaagtataacaaattcccctgcctctgtctcattgattcataatcctaagacaagggcaggggagttgaaacgggctttcccgctttgttcttatattatattgagggcaggattttaataagctcttccccaatagaccattttcttggcaggctttccgcagcaaacgcatacatcggaaatctgctcttgctcaaatggaatacaacgggaggttgcctgaacatcctctttgattttgtcttcgcattcctggcagccgcaccacattgcctttacaaatccgggcttttcattgatggtctgcttgaattcttcgtagttggaagcagtgtaggtatgggcgtctctgtgggcacgggctctctccagcatgtctgactgcatggtctccaggatctcctgaaccttctgggtgagctcttcaaatttcacaactgttttctctctggtatctctgcggcagatgactacctggccgttttcaatatcctttggtccgcactcaatacgcaccgggattccacgcatttcctgctctgcgaatttgtagcccgggctcttgtctgtgtcatccacttttgcacggactccggctgctttcagggctgcatacagctcatccgctttttccaggacaccttccttgcgctgctggattggaattaccactgcctgaacaggggcgattcttggaggcagaacaagaccgctgttgtcaccgtgaaccatgataatagccccgatcatacgggtggtcattccccaggaggtctggtgcacatattgcagcttgttttctttgtccgtgtactggatgccgaaggccttggcaaatccatcgccgaagttgtggctggttccagactggagagcttttccatcgtgcatcagggattcgatggtataggtagcttctgcccctgcaaatttttccttgtccgtcttgcggccttttaccacgggaatggcaagaacctgttcgcagaaatctgcatacacattcagcatctgaatggtacgctcctctgcctcctgggctgtggcatgggcagtgtgcccctcctgccacagaaactcacgggaacgaaggaaggggcgggtggttttctcccagcgcaccacggaacaccactggttgtaaacctttggaaggtctctgtgggactggatttctttctggtaaaaatcgcagaacagagtctcagaggtggggcgcacgcagagacgctcctgaaggggctccaggcctccatgagttacccaggcaacctctggggcaaagccttccacatgatccttctccttttcaagaagggattccgggataaacaggggcatatacacattttccacgcccgtctccttaaatcttctgtccagctcattctggatattttcccagatggcatagccggcaggtttgatcaccatgcagcctttcacactggtatagtcacaaagctctgcttttttcaccacgtccgtataccactgggcgaaatcttcctccatggacgtgatggcttccacaagtttcttttcttttgccatgattgtgttctcctcttttattatttcaattttattttcacttttttgcggtcttaggctttctatgcaataaaaaaagcctccatcccacaagggaccgaaagcttcggcggtaccaccctggttaatattccccctggcctcaggctgggcaggaatactctctccaatccgttaacgccggatatacgttatgcttactcacataaagctccaagacgggttccattgtctgcgcacaggattctcccaccataggaatccctctctggagattgctcgcaatgtactattctcttcaacgctggtttactgtattgggttttcatgagaaataatctttcattattctatgcgaaaaatgggggattgtcaagatggggaaatgagaaatttgcgggcagcgtagctgcccgctgggttagctattatttattaaccagtttaaatccattatcttcaagccatttattaatattgtcacctgaaacactaccaacatctttaattgatatacctactggcttttccccgtttttatttttactttcataaatcttcccgtctatataaacaagactggctgtccaacctcccgttcccgcattgttaccacttgaagcaaataatagtacctttctatctgctggattataggtatgtggtctccaatataattcctctttttcaaacgcactaccttttttcataatatccgatacttttggcaagccattcagcttattataaagttctgcaataaccctaccatcctgagaccaattttggctatattgcttatgtagctccactgcctgcgcaagaaaacttttaacactgtctacacaaggacagattacttctgcaataggaatcgaattacttccagaaataacctctaaagaataaggctcattatatacagggcacttaggttctccctcttctagatatccattatcttttaaatactggataggtttaccactagttatcactgtaacatcctcagtactggtacaggctgccagttcactatgttccattgccgcaagctgaaaagctctctcaatagattccctctgggcctcacatttggttactttggattttttcacatatttcgtatagctgggtgccagaataccaattaagatagccagcacggcaacaactataatcagctctatcaacgtaaaacctttattttttatcttttgctcattcataacaggtttcctcctgccacttttctatttttcattttcgcccaatcataaaatgctcgttttctttttatctatttcctgccaaactattttctatagtattttagtatattttactataatttcggacagaatgaaatagctaatagaacaattttcgtgcaatataaaaccatcgtcctgtacattatgcgcatagacgatggttttcatatgaaatcctatgaattctattttcccccggtgatctcaaccaggtttttcttcagctccagcatcttgtcacgcagctctgcggccatctcgaaattcagatccgccgcagcggcacgcatctgcttctctacctgagtgatcaatttttccagttccttcttgctcatggactcgggatcttttgacagcttgtcctctgtcttggccactgccttggaaatggcgatcaaatcccggacagccttcttgatggtctgaggggtgatgccatgttcctggttatacttctcctggatctggcggcggcgctccgtctcatcaatggcaatgcgcatggaatctgtcatattgtccgcatacataataacccggccctcagaatttcgtgccgcacggccgattgtctgaatcagggaagtctctgaacgcaggaacccctccttgtctgcatctaaaatggctaccagggtgatctccggaatatccaggccctcacgcaaaagattaattcccaccagaacatcaaacacatccaaccgcatatcccggataatctgtgttctctccagagtatcaatatcggaatggagataccgcacacggatacccagatcacgcatataatctgtcaaatcctcagccatgcgcttggtaagagttgtgatgagtatcttgtttttctttgccacctctttatttacttctcccaccaggtcatcaatctgaccttccacaggccgtacctctacctgcgggtccaaaagtccggtaggacggataatctgctctgcacgcagaagctcatgctctgcctcatactgacctggagttgcagatacgaaaagggcctgatccagtttttcctcaaactcctgaaaattcagcggacggttatccttggctgagggaagacggaacccgtaatccaccagggtctgctttctgctctggtctcctgcatacatggcccccacctggggaatggttttatgggactcatctacaataagaagaaagtcatccccaaaatagtccatcaaggtataaggcggctgtcccggctccagcccggacagatgccgggaataattctcgatccctgaacaaaagcctgtttccttcatcatctccacatcgaaattggtgcgctcggcaattctctgtgcctccagaagcttatcctcgctcttaaaatattccacctgctccttcatctcttcttcaatggcgtctgctgccctaaggatctggctcatgggcaccacatagtgggatgcggggaaaatcccaacgtgggcatcctcacatttaatttctccagtgagaatatccacatccgtgatcctctcaatttcatctccaaaaaattcaacccgcacagccctgtccgtatagttagcaggataaatttccagcacatccccccgtacacggaaggtaccccggtgaaaatccatttcatttctggtatactggatatcgatcaactgccggatcacatcatcccggtccttctccataccaggacgcagagagatcatcatgtcctggaaatccttgggggaaccaaggccgtaaatacaggacaccgatgatatgatgatcacgtctcttcgctcagaaagagaggccgtggctgagagccgcagcttgtcgatctcctcattgatggaagaatccttggcaatataggtgtcggtggatggtacgtaggcttctggttgatagtagtcgtagtaagagacgaaatactccaccgcgttattggggaagaattctttaaattcactatataactgtgcagccaatgtcttattatgggcgatgatcaatgttggcttgttcagcgcctggatgacattcgccatcgtaaaggtcttgccggagccggtgacaccgagcaaggtctgaaattgatttccttctttgaagccctgcaccagctcggcgatggccttgggctggtcacctgtgggtttgtattctgatactaatttaaaatgatccattgtgcttcctttctcatcaatgagattgaatttggggttgagtttctacctcgaccgcttaacataacgtctatttcgattttctcctaatgcttcgattttcccttccgcaactaacgtggcaagtagttggcgtcttctacttgtcctcacattcaaagcatcagcgatttcgctcgccttatattctttttcaggctccataaaccgcaatataatttccagttgcatctccgttttttctgatttatcttttttaccgccactttttatcgcctcttttttatcgccactttttatcgcctcttttttcagaaacgataacattaatattgtgcggtcgggcccgtagcactctttaacttccggagtccgccatccctgctgttcccaaataccatagatatccggcacaccacttccagctctttcaccgataccaatcagattcagcattttcatcaatgccttgttgcgtggatcagagataccacctttgagcatctgttcttttccggtgcgaatatttcccggattttcaaacacaatcccatgttccagcaatccttagcgcgacaattatgtctccaattcgctgcacatgtgcagcgaatttctgtcatttgattttctattaccgatttacagttcctttagtcgctgcacgtagcgacttattacaaatattctcctgttatgaatccaggtcactaatccacccagtccaaccagtgttttgtcgtccatcccgtccatttagtccacaaaatatggtgcaaacaataccaaccagtagtggttggaaattcatttcatagtaggacgcaaaatactcgaccgcattttcgggaaaaaactctttaaactcgccgtaaagctgagcggcgagggttttgttgtgggcaatgatgagggttggcttctgcaatttctggattacattagccatcgtgaaggtctttccagcccccgtaacccctagtaaagtctggaattaattgccttcctggaagccttttacgagggcttcgatcgcctgcagctggttgccggtgggctggtattcactgtgtaatttgaactccatatttatgcttcctttccatagcagcttagtaaacttactatgcaatagaatattttagctggcttatacacgtactttttttgctcagttatacatgttgatcactaatttgtttactgtttaatcctttaactcattaatctttaataacacacagatgcattcatcacaacaattctctttttcaacatttaccacatgacattctctgattcttttttcctcaataaatttattaaaggcctgagcataatatctggggacatatcccaacaaccttcgctgttcatttactacacgaattgcgtttttatcgtattggttatttttttcttgttccaaaaaaacctcatcaccacgtgtaacccgcagcgtctccgtgcacttttcaccctcgcagcccaaatagtgccttacccccgctacgtaaaatttcttttcaaattcatcttcaaagtctaaaatcggatctataaattgcaaattatcaattggcagttttgcaccgcttctctttaataactcatacgaatcatatttttccaatttatacttttccaaaatttttttaatatcttttctttttttgtccggaagtctgcttgaaaaaacaggaaacaattcttcacatttatatacatttcctagcttttcaaaagataccaatggcttaaatccaactttaatcgcatcttcgatttctccaccgtattggaattcatattgtccatttttggtaagctgaccaacaatgtattgtcatctatttgaggtgcatttccaaattaaatacaaatagtctttaccatttttaattgccatgtcactcctcctctcccatatagacctcttccagcatctgctttttagcaagtagaaattcaaaaatcaaccgttttttattatccgataattctgcagctgaatactgttttaatatatcgcgaatttgttcttccatcattacagcactgatttttttcgcaaattcacccgtctctgaaaaatagttttcttttatatatttcaagacattcaaatgtgtcgggcgcttttcgtcacagacattacagcggagcaatgattttgattttgtatcaaccagtgctttccatctgtttttatctgtccccaaataattttccacctgatcttctgatatatatgcacataatgaagaactgttgtcatacaatggagaccatgtcatttgatcttcttctaaaagaattgcccaattgttttgatgtctatctgaatttccaatcaaataatcaaaaattaacattttaaaaaaatcattaattggtacgaatcgctctattgacttttttaccatttctatggaatatctatgttgcgtgttaatgtcaataaacttttctgggttatacccgggataaatcaacgtaatgaaataaataccttcaataagattctgggtaggcttttcaataatattataactaattgatccttctctcccttgatacattcccagttaaaattttgcacaaggaagttccagtaattttgctatcttataggcaatacactctgaaatatggtcagttgtaccatgacactgtaacactagataaaacctgatggatttcgtatcaccaaagtacactagaaattataacatactaaattgcaaaagtataggcacaaacccgaacatttattcgtgttttaaatctgattgttactgatttgtttcttccatatctatactatgttactatatttcttctgccgcacgggttatttcttgtataaggaagataatctggctctcgtctccacataataatctggatacaattcccttagattaatctccttcataagatacctccattttggtgttgggtgaaaagtatatgcccatacgattgttcttctcctgcacaagtaacttctgcatgctcgtcataacacaatctattgcctggtattgtctgaactttgctccgaactacctatgcagatttgctgctttacaggaatacgatattgataatctggtatatttttaataccatcattaagaattctatttcccaaattctaaaaactcccatcctccgcaaattgtatggtaagctcatgggtaatcactgcctcgctatatactaccatatcacagaccgcttccactgttaatgtggtcgttccattttggttctcttttacatcaacaccctctggcaaagaaatcccaaataacgtaggcgcataattcatacaaccaagccttgcccatgcataagtctgatgttcttcatcaaataccgcccattcccgtatctgctctgctgttaccggaagaaactccataatcagattttcaaaatcttttgccccaataccatctggataatcctttgaaggaaatctgtcctgactctttgggcgatgacctggagctggttgccagtgggcttgtattctgatactaactcaaagtgatccataaactactcctttgtcaaatgcacctatgcatagataacgctctctacttgttcctgattgggtaaatttgttacctattttaaacaatactttttctttttagtcttcccactagatattactttcccgtcttttatcagttcctgcagaataactcttgttctagcttcgcttaatccaagcatatctgcaatatcgcttgtttttaattcgcctttatctttcataaactctattatcttatctttattttgacatgtttttttcgcttgttttatttcgcttgttttatttcgcttgtttatttcgcttgtttttttcgctttctcatccataactggttcttccaaaaatcccccatgtataaaaaacctggagataaaatagctacgcgcttcatctgtttcaaattcaggttttggagaaccatttgcctctaaagcatcaacgattttcttaaatcccgtatttctcccctctgtcaaatgcaattctttcagaaaatcaccaattctgcggttccgatatcttcggtttgacacacggtaagatttcaacccctccatcgttaccgatcgatccggcccaggaaaactcacaatctctatcctgtcattttccactctgacttcaattggctcgcgttcatcataggcccggtgataaactgcgtttgacaaagcctcctttattgcaacatatggataattgaaaaagcgatctgcttctgcccggtctggatgttttacaaccttttcagtaataataacatttcttatttactacaacgcatctctgagctgctgatgaatcagccctttaaaagtctgttcaataatatcatttccccctaacccctccggaaattgaacaacgtctatctgtgtgtatggaaaaaacttatccggttccatactaaatcattgctcattttgatacatcacaacgatatcatcgaaagatttcactttatcatattcataaccaatattttctatatcggatccactcaacatctggttcgcatacttccagaataccattccttgatatacatccccataatctcttgctgctacagaattccccattccaattcctttcttcaatcgttcataatatgtttttgactatctcacttcactatcagtaagcttaaccttctttcttatttcccccacaagctgatgcaccgttgtgcaaggacacatctgggatggtatcgttttcccttcacggactcattgctcatatttacgctgtgcaatttgaattgccttctcctcatcacctgtccaaaagattttttcgtacaatccgtcatcagcttttgaatatttctgtccggttcttctctgatatatttttccaaactctctacaacaagtccatgattctgtaatcgtcggcatctctccgtagtaagaatacatccatatctcgaagcatggatttgaccaacccacgcctatcccatatgcctcggcctcttttataatttcatcgaaatcctttacctcgtccctgtcaaatacaatccacggcatgcggtactgtgcattataagcagtcatttccagacacttgtctatcatggttctggttttggtttctactaccttaatcaccagtttattctgtatttcatctggcaaatttttgtgcaagccctggaaataacaccgctcagttgcctccgtatctgtaacaataagataatatcccagtgccggaatctttaaagggcagcgctcatctctggactttcggttaccagttctgtcttttctcgccatgcacctctatacctccttaaagatatctatactcttcagtgttggaatggcaccatactttccgatcaggtaattcttttcgtagctttcatccttacgaatcctcgctccagcctcatccacaaaatctgccagcgagtacagatttgaaattccctgctcatccttctctgtaaaccacacttcatctcttcggagaagctgatttgataactgccatgtgtcatgtgtcgtaaaaatgagttgtgcgtgatttttgttgatttccggatttaggaacgtaagcataaaattacggaccagcaatggatgcaaacgtgcatttaattcatcaataaaaaatacgctccctttttccagaacatcctgcaattccggatataatgcaaacattttcagcgtacctgcagattccatccccaacgggattgatgcatatgtgtcagaatctattttcttgtgaagtgcattgattttataagttacctctttgttttctccatcactaggagccttctctatctcaaaatctctgatatgttcatcaaaagatgcaaaatactctaccacctttttttgcacactggtatcgtccacaaagccctttggcagccgtctggataaaaagaaatttgtaaagggatccccaaaatccgcaaactcattggcaagaaaccagtcacggacatccttgcatttattcaccctcagctttgcccctaatgaggaaataagcacctgcttttccaaagctatccgaatattatcctgactgctcttaggaagccctgacaaatccagaacatcctcttcaacagagcggtaaaataccgacgtaaatttgcgggcggttctggccttggaattcaaccattcttctgtcactccataccggtcaatgcaaaagccatagttatatgtcctttccgaattatctccaggaatcgtaaaatatacttcaaaacttgattcttcagtttctgaaacgctgtcaaacaaaaacggagttggcttatattcttcaaatttttcttcttcatctccatatttgaatgactcaatcacgtaatccgccatatattcgaaagcattataaatatttgacttgccgctggcattagcaccatagatgattgccattggcaaaatcttttcatttcctatttttacaacccgctctgaaaactctgtcatttttgctgcagataaatccagagttacttcctcacggaatgatttaaaattcttaaaactaaattgaattagcatcacttcacctctttctcatcttcttctatattatattcgattctcccaaatatatcaacatataaattaggctttttctcacttaagcgtatttctatgcatacaaaaaaattgtagaaaagcgatgcaaaatatgcaacaccataaatacttcatatctcaaaataatccgatagatgctctccgctgttcaatataaccttttgcttacatggagcagccttacacctttccggtgtaaattccaagggtaaattctcatatttaaaggacatacctgctaaattcttcgcctctatatgttttgaagagaatatgtttttcctgttcctgtaaatgccgctattacttctcccataaaaattccattcataaaatgattttgtttctctcagcatatttattcattgtctttccagtaagctgcctgatacggtacataatcatcatattttagctgatacataagttcatataaatcgtaaaaattcagatttgtaaaatcctgctcgctccaatcaataatcagcatattattccgttcatatccaaccggaataacatattttttgtttaactcccggcaaaaattatcaagcggttttactcgaaatcccttttgccccagagcgctatcaaatcccggcggatggtattcctctatgaaaaaaattttagttctcctttctgacccctctgtgcattttcacaaaattgttccacctgttcatactgaaaccctcatgcaatccttccagtctgatgtgatgctgttcaaaatcaaacagcctccccacgtttgctctcgttgtattggaaatgcccacacaatatctctgtttcaccctccacattctcaccccaaaattactttttttacaaacccatgaaatttttttataatttctggaacactaagaagcaagcgctgatatttcctgcccccaatccaacgctacataaatagattcattccttaataagaccttttaaaataagacgtactcgaaataagaagtacccgaaataaaacatacctgaaataaaacatacctgaaataagaaatatccaaaatcccataaggagaaccccatgcaaacactcacacacaccacagacgaaaggccatctgccagggatattttcagcacggtcctatacaattggaaagccctcctgtgttttgagatcctctatcggggcacaggcttttgttttctttttccaaccctgagagatctgttgagcctgctgcccaatctggccagggaaccttatctggcccagaaaaattttataaaagtatttcaacaccccagcgctgtcctgctgctgtgtgtcatcctggcagcggcagttttctatgtatattttgagattacggcattattcttatacagccagaagtgctggagcagaacctccgtcaccgtctggcagctatggaagcttgccgccctgaaaaccctaaacctcctaaagcccaggaatctcccagtgttccttcttgtcccggtgatgaccttttctgtgtttgctgtgatcagcggatacctgcaggccatacagcttccggaatttatcatggaatacttacagacttccccctggctcttcctggcctttgccgcctttgtggccctgtgccacatcatcctttttctgtacatgttcctctggcctgccatgctcctggatggcaaaagttttcacgactcccgtaaggaaagtataaagcttttaagaaacaacaagcttttccttctaaagggacttttcctgtgcctggcagtcttttttctaggtctgctgtttttctggattctggcagtgtgcgccatggccggggccgcaaagcttttttatggagcccaggtccgccggggacagtttcagcttctgtttctcacctttgaaaatatctggcccatggtttccggcgccctcacctcagttttcatctgctccgtgatcgtcctgttctaccgccagatacagggaaaagcccgccccaaagctcataaacgccctttccagatttccaaactcactctgcgtgtgctggcaggaaccgggactgtcatgctgctgatttttttcagtgagtcagagatgagcggcagaatctggtaccctagaaatctttccacccagatcgtggctcaccgggcaggggccgcatccgccccggaaaataccctggctgccctgaaccaggccatccgtgacggagcctccatggcagagattgatgtgcagcagttaagagacggcacactcattgcccttcatgacagcaatttccggcgcaccacaggcaaagctttaaatgtctgggatgcagactatgaggatctaaaggatctggatgcaggtactttcttttctgaccgctttcaaggagagcccattcccacccttgaggccatgctgcgcactgccaaaggacggatttccctgatgatcgaattaaagtccacaggccgggaaaacagcctggtggaaagtacggtctctctcataaagaaaacccagatgcagggccagtgtaccattgcctccatggaaatggaccttttaaaggaggtaaaaaagcaggaaccgcaaatccccaccgtgtatatttccatgctccttttatccagagaatatggtctgcaggacattgatgcctacagtgtggagaccacctccctgtccccagtccttgtgattcaggcccatcttcaggggaagcaggtgtatgcctggactgccaactctgaaaaaaccattaacaaaatccttcacagcgaggcagacggaattattacagacaaccctgtactggcccgccattgtatggataaaatcggcaaaaataccctgtgcaataaaatcactgattttttcttcccagcctgagatccctcctgttggacaccttctgatgctctttctccataatctccttccagtcattggcaaattcatcaagctgactgccgcagatatggtcccttgcccgggcaatactgtcccggtattctctttgaaggctgttgtccttcagccgctgcagtacaaagggatatccccagtccagcagtccctgcattcccctgtaggcttcctttacaagatgaagaggacatttctcctcaataaaggtgaggatcacctgaaatcccagatagctttttttctcctggcaaagtacggcaagcccctctgccagagcctttctctcttcttttgtcacatgctccagggtatacaggagcacttgacggatggttaaaaccataatttccaggctttcctcatagaggcacagcccctcctgaatctccggtttgtcataatccacctgactgaactccatgcacacaaaggtcccttttccgtgataagaccggaccactccaaggctgttgagaatatccagcccacggcggatggtattcagggacaccccatactccctggccatcacgggaagggagggcaggcaggttcccttgggatacttgcccacaatgatcttacgtataattttggaaaccaaggtgtatctcagctggggccgctgccggtagatattccacaaaaagggctgctgcactgcatcctccagatgatactggacacgggactgtcctatgaaggagaacagctctcccacagaatcctggaaggcctcctcaaagccccccttcaggaaagctatgatctcttccttggactgtccctgcagcatcctggccgcaaaaagactctccttctcatcagccaaataaggaaaacggatatagcggatggtctcccagtaaagattcagaagcagaccattgtgaaacgtattcaggcagagaatataaaactgtactggcatggaaaccatatttgccttggggtgaataagattttccctgagcacctcccaatcctcctggctccatttgcgcagccccttttcccacactggttcaaacagcagctttccagaatgaaacaggtccaggatcccttccttcctgggcacaaaatattgtgcggcatttgtcctgaactggcccggatccgcctggtaaatcaccctggccaccttcctggcctccatacagatgtagccccgcttttccaaaagggctagggcagagcgtattgtggcaggggccatattgaaaatttcacagatattgctgatggatggaagtttatccccgtatctgtaaaacccaaacagaatcctgctttcataataatcatacaccagcttgtaaaaactgctgttcatctccatgtctctctccttaaatcctcatgtgccttctgtgtatctgccgctcttcctgcaaatcctcaaaggcaccttttatcgatgtatctctgtatctgtggaatgcgctgaagcttcccgcaaatccccaaaggcaccttttatcatgtgagatacttgtgcaaaaggtcttcaaaggccttcacgtcaatgggctttggaaaatggtcattcagccctgcacgcatggccttctgcacatcctcctcaaaagcattggcagtcatggcaataatgggcagatgcttcacatcttctctgtccatcttccggatcactctggtggtctcatacccattcatgcccggcatctgaatatccatgaacaccagatcataatatccctctttggcctttgccaccatctccacggcagtctccccgtcaacggccgcatccacctgcagccccatttcttccatgaggactgtggcgatctcccggttaatttcattatcctcaacaaggagaattctcttattgtcataaatgttttcattggaaagggcagtcaattctcccgtcttcttgtcactgcctaattcccggaggagataacacaccttggtgcggtaaaagggttttgccaaaaaggcagtgactcccgcttcccttgcctccgtctcaatctctccccagtcataagcggtaagaacgatcaccggtatatccttgtcaatttctcttcggatccgccgggccacctcaatcccatccatatccggcatcttccagtccacgatgatcaattggaagggatcaaaggagtccttctcttctatcacccgcttcaccgcctgggctccctgggtgacaaactctgcccgcagactcatatccaggagaagctctgacacattttcacaggtctgtaaatcatcgtccaccagaaggcagcgcacaccgatccattcctgtggtacctcctcctggtcctgctcctggaggcgcagaggcaggctcacggtaaacaccgacccttgttccggtctgctttccacaaaaatctctccgttcattaagtccaccaggtttttcgtgatggccattcctagaccggttcctgtgattttgctggtagtggagtccttggcccgctcaaagggctggaacaaatgctttaggaactcttcgtccattccaatgcccgtatccgcacactggaaaataaagcgccgataccccttccgggaacaggaggcttccttgagctccaccaaaatgctccctccagccatagtatatttcacggcattgcttaaaatattaatacagatctgccgtatgcgaagggcatctccaataaccttttcatttttcatatgttccagatgcacctggatatccaggcggtcagctcctgactgagagcggaccagctccgcacaatctgccaccagatctgcaagattaaagggctcctcccggatggacagctttccgctctctatcttggacatatccaacacgtcattgatcagactcagaagatgctggctggaaaagcttacctttttcagacattctctcacccggtccctgtcctccagatgtgcattggcaatggctgtcattcccaggattgcattcatgggcgtgcggatatcatggctcatattggacagaaactggctcttggcctcacttgccgccttggcgctgtccagtgcgctctggagggcctgacgccgctgctcctcctcgtagcgctgctcatcaatacgcctggacataagaatcgccagtttatcctgggaatacgggttatccacataaatgatctggatggagatccaatggtagtttccatccatcatcatctgctttgtctcaaagaacacctcttttttgtcctgtcccagagtctcaaggagatactccggcgaaaaacgcagccggaattcctccatgctgtccggatgaatggcggatgcaatatctccatagagctggctgtaggattgctgttctcctaagtttatcatcaatccctgcttcacataaataaaccgcagggcatcttttgtaagattcaggctgatgatcaccggataggcattggaaattgcccccaccagggtgacacgctcctgaagagtttctctttgcgcttcttcctgagccagcttttcacttgtgatgtcgtggaaagctgcgatgagcacaggttttccattttcatccagggtcttttccacaattccagacacccataacaggcttccgtctgttttccgcaggcggttttcaaatatgcttttctgtccctcccaggaacaattctggaaaatccggacagttttctcgtaatcctcctgatacaccacatcctcaaggctgtatcctttcaaagaatcattggcggagcccagagggtagcccagcagatcgaggccctcctgatttaactggtagatccagtagggagtctccaccgtgatcagtgcgatcccctcgggaaccgcattatataaatgactgatatactctgcctgatttttcagcttccggttggtctggctggcatatctcagataaaaagctaccagcaggaaaatccccagaattatgcagcccaccaaaaccaaagaccgcaccaggatttcgttggtctgggcatttaccactttctccggaaggatggagataaaataccagtcagtctgaagcttcagcggcgtataacaaaagaccgtattttccccctgatagtcaaatacagcccaccccttgttctggtcggtaagggactgtttgaattcttccaggctgttgtcattgttcctggagcttttgagcatatcaaaaaggttatttacagtcttgttactgttgggatggggcggccggatcaatatcttgccctgtgtatttaccacataagaaaagccggtatcattataaaaggacactgtaaagctgtccacaatgctgtcgatttcatattcctttaccagatacccgttaatctcctcattgatctgtatccttacaaataagtcaaagacgttcatccctgtaatactgctgatatgaggttccacgattccatggaggtcctcccgtccaaggtcatccagagtctgccgcaccttggtatcctgcggcccattttcgggaatacgtcttccgtccttcaaatagaaactgacgtttgcctccacctgggaataatgttcaatgaccttttccagatccccctcccgggctgagagatcccctttaaaattcaccgccatctggcccatggattcgtagtcctcccgaagctgtatcttcagggtattgcatccctggtccgtgctttccataatcgtctgaatagactgctcccacagctgactgcgcacggtcccaatgaactgaagggtaaggacaaacagaatcacacctaccagaattgctgccaaggcaatttttttctttgccttctttgctgcctcttgtaacattatggcgcactcctttccttggcggcctcatcatccagccagcggattgtctcctgaaaatcctcccctgccaggatcttttgagacacctctgccgtcagctcccaaatggggatatccagcagggtatctgtgccgatcaccgttcttccagactgatagacgcttaccaattgctgtacttccttcactgaagaaggattccccccttttagagggctgaaggaagcctgctggtctgcaaatctttgtatattctccctttgggtataatattccacaaacttcatggctgcgtcgatgtttttactgtgggcatttacacttaggcgggtatccggatttataacaatgagacttccgtcctccaggattgggtagggaactacctgaaagtcaaaatccggctccattgcctccacacgcacagatgcccaggcaccggtgagcataaagggagactctccctttacaaattcttccaggtcatcagaggttttcttagtggtcagggccttttccccgtccacgtagcctttttctataaaatctgctgccatgccaaagccggaagccagatagtcactgagcttttcttctcctttattgattttgtcaaagacctccttctgccgcccctcctggtatacggaataaaagccttcgccaatggccagggtctttaaggaaatgtcattgttggccacaataggagtgatgccccggtccacataataggcacacaggtcttcccacgccttacgattctccggtatctgctgcttattctccttcagcagatccatattgcagtaaagtccaaaggctgaaactgtggtggggagccagtagatcttcccctgttcctccatctggcttctcatggcatccgtatagtcagagatggtgctcagcccggataagtctgccacctgtcctgcggcctccagctttagaaggacatcatggtttaccataaacacatcgttccccttgccggcctccatccgcttttccaaagccgtatagtagtccgtgcccttaagactttcgtaggatacacggatctccggattttcttccataaaaccagaaataatctcttctattaccgtcacattctctggctcatatttattgccgaaaaatgttatggttgtaatatcttcatccgtggtctcatgagtgaccacctgattattattcccgcatcctccggataaaaggacacatgcaagcatccctgcacacaaaatccgttttccttttccaatcatctcaacttctccttcactcctgtgttccactgatccaggaacgcccacccacctgctgccaggtgcatcccatgctttccaggaccgaaacctgtgttcctcctgctggccatcaaagatcctatctactttaaaaagaaacgtattcccgttcaactctgtccacatatatgctaaataattgtagcacagaacaccagggcccgcaatccttttcaagaatccaaagtctcctttcccaccccaaaaaaaggaagcctgcatcttgtgaaaaatgcctgcttccttctggttaaccttaccgttcactctgtgtccagcctcccgccaattgcccttgcataacctttcaggaaagactatactggtcttataacaaagctggcaagcccgcttcaactgtccatcccctcactcatgaggggcttggcagattatgcgcctgataaaggaggtatcctatgaaattatctgtcacaaaaatcctgtccctgctgcttaccgccgcactgccggtgctggctccctgccaggtatctgccgctcccaaaaatgcaccgccggctcctctttgcacagccgtcccaagcccaaagggcagttcttcccaatccccggaggtttctgtctctgaccaggcccagaccctctatgacctgcgcaatccctatgtgggagatgcctccgcagacggcagacttctgggggccctggacagctatcttcctgacaccccttacaccattgaactgtacacccaggagccgccctatgcactacagctggctttctcccagaaaccggaatggacggacaaggaaacgactgttttggacctggaaatgcaggatgcaggtctattgctcctggcactcattgacaacctggaagaattccagtggtcctatcccctggaggaaaaggacacgcaggacggcctgtatactggttacctctccgttgaggatgcctcccagctttattctctggaggatgtgaaggaatacggccagtcaccagagaagctggaagaactgctggaaatcctctctttgtcccgggaagcccgctgcacagcagacggccccacggcctatttcatagcagggaaacaaaaatcctgaggctcatccactaagacgtaaattctgtaataccggtacccacaggatatttgatctgggtggtgtaccggtaattttcatccagctccgggatatccacaggaagtctgccatggggctggatcgttcccgtaatcacatcaaaggcggccgccagactggcccctgagctcccagagggctcccctgtggcatccagactcatgcctgcagagcagtaggtgagtaccatggcatctgcctggggataggctcctgcgtcatagggctggccgatactgagcaccaccactggtttcccctgtgttttggcagatccaatgatggtctccacagacagactcatccaattcccctccccatagggattcagctcttcttctcctcccagctcagacaccacaagcacataatccattgtggatatggtgttttgaatcacatccaaattactgccctggttgtaggaatatccctgtatctttacattgggatccatctttccttccttctgaagacgtgaaagaccgtactccatggctgtcacctcattgtcataggctcccaggaccaaaatgctctgccctgcccgggcccttatgggaaggacctgattttcatttttcaccacggtgatggttctggctgcaatctcccgttctgtatccttatgctcctgtgaacccagggtggacacagccctctggatcctctcctgggagagctcttcctcatagctttggccaaggatccctcgcttctcctttgcctttacaatgcgaagggcagcttctgtaatggtcatctccgagatctcacctgcagtgaccatatcctgaatgtcctgaatatagttatccatggctgcgaaatcctgttccgactggatggccacaggcatgagaagcagatccacccctgcgttcactgccagccgtgctgcatccccgggggcaaaattctcctgaatcgcccccatattcatggcatcggtgaccaccaccccttcaaagcccattttctttcgcaagatctctgtaacaaaggtcttggacagggttgcggggagggtgacacgctctcctgtcaaagacacatagggctctgtttcaatctgagggtattgaatgtgggcagtcatcaccagatccgttccctcatccaccgctttctggaaagggatcagctccagggcggctatctcatcatagcttttatccacctgaggcagtcctgtatgactgtcggaagaggtatctccatgtcctggaaaatgcttcactgccgctgccgttccggtactttgaagccctttgatcagctccgaccccagagctgccgcccggttgggatcactggaaaaggagcggaccccgataaccgggttggagggattgctgttcacatccagatccggtgcgaagtccacattgatcccaagggctgccagctcttctcccatgagggcacctgccgcatacacatccttcggttccccgctagctcccagagccatatttccaggcatcgatgtcccaaaggacagtctggtgatctccccgccctcctggtctgtgccaaggaacagaggcagaccgccggtctgggtcactgctttttgcagctgatgggtgagattcaccgtctgctgggggctttccagattttctccgaagaggatcaccccgccaaaatggtgctgtccaaggaattgggtaagctggtcattaagcccggtcacattctgggaatttccctggtcatctgtccacacctgaaaggcaggcataagcatctgttcaattttctcctccaaagtcatggctgccacgaaagcctctgcccctttggcattttttgccgcataatattcctctgacgggatcatatccaccagatctccctccccaaataccgctcccggcagagccgtggaaagacacagggccagaattgccccggctatccgtttccctgttaaaatcaaattctttttactcacagtctcattccttcctttccaaaaaccaccgattccgtcaaattcaagttcctcatctgttgatcttatgtgccagtctgccgctgcatacatggatacctctgtgcgctgccggcagcccaagccccaaatattcctggcaatttccaatctccctgatatttttctgtaacacacagcagaatcctttggaaaaagacagcctcattggctgtctttttgtctgtcagttaatccgattttcatcaagctgtacaatgcaggtggcagaggagacatcctggaagacaacctgccccagggattttaacagctcctcgttcagccgtccgccatacttctccctctcctttgcccccaggaacacataggatacctgataatttctcaaaagctccttcacccgctgggtgtctgtggaggtgaagatagtttccacatcgccgctttttatattcacatctcccacatcgcctctccacagccattcatggacataccatcctaatatggtgggcaggcctgtcatggcagacacccggttgtacgcactgtagctgtctccattggcctccaggaccacaggctgtccctccacgttgttttgaagccagtggatggccgccgcgtcctcactgtggtctctttccagaaaggctgtggtgttctgcccctggtaggtgtcaatgttgaaaatattgccataccaggaattcaccgcatttccaaaatacccgaaggtggacagcagacagatcagccctgccgtgccaatcaccttagaagcccatcttcttgacacaaacaacaggcggaagataatgtaggacatacagatgccaaacatgatataagcctggtaggtcagcttaaacatggtattggccctggcgctggtggcctcataaatatctctcacgtacaccacttccggtatggccacaagtcccagagcgcaaagccccagaatgagaacaaaaaggtccggcagacccagggccctcatccactggctgatcttctttccctttaacttcctcacaaccgataccaaaaagaaaatcaccaggaaggctggcagcccccacagtacacagagctgatacaggggcgtatggttttgggccagggcgactccctccaccatggtctcaaactgaagggtaaagggaaggatcacaaccgtggaaacaaacaccacttccagagcctgagccgctgtcactgccgccacaatctgaaccctgccccggaactggacgatgttggaaaaaagcaccacccctccggtaaccacaaagtagatgacaaaatcccagtaattggtccaatgaaaaattcccagaagtacacttaccataaggacctggggccgaaaaagctcccggtacacaagtcttctaagagatgccccctcctggtatccgccttcctgccgcacctgcttcatgtatccatacagaagtcccagcaccagcaacacaaacattatgttcaccacatgggcgtgaagatcccccagaacaaaggaatagcagggaaattcatgaatggtcttatccgtgggcacatccgggttgtgtccaatgtaccgggtggcatccgggaaccagtaggcagcagcctccgcagttcccttgattttgtttatgagaggaatggcgatccggtataccacgtagtgcatgtttcctgccatggaaactgcccctcccgccaggattccagctaaggccggcattccttttttccccggacgtctgcttttgtccctcataagctcataggtgagggagcaggggagggagaaggccagggctgccaccagcattctcatcaggttataggtgatggtgggcctggttcctgtaagctttgtaaggaacacagcaaaatactgtcctccatagtaatagttcaaagtcccctgagaataccacatatccttgggcggaagggtggtgcttcgcatcatggcctccataaatccatagtccatgaatttctctgtactgttagaggtctccggccggaaacctgcaatgtacacccacataaggaaaaccgcaaagaacaatacctcctgccagaaaatcagattcccctttccctctggaaagcagctgatccctttcttcgtctgccgtctgaaaagaaaaaagctggcccctgtacaaagaagcgtcaccagcacacaggtgaaggtggtaaacttcaaaattttcacagaaaccaaaaaccaagtggcaaaaccagtcacagcaataccaagcaccttggagaacatccatccccgatcttcaaagcccgcaaaaagccgcccggtcactggcataaagatcagtcccagcagccctgccaaaagccaccaggtgagaaaaggaatgctctctctttttaacagaaggaacgaggccccccataaaagtgcaaacaccagaatctttgcacttggatgggccgctgccttcctccaagctttttccataagtctccctccgtatccttgtatattctcaatttgtgcagtctcctggactgcggtcaaatactttttctaagcttcagaaaatctctgaaggcctttctgccaatgcctacaatccgcttcatattaatggaattcttccctccctgccggggacggaaggtaattgggtaataatgaacgcccatcttatgcttttcatagatcacggtcatgatcacattggacagatgaaaccctttgggaatcctgtccagaacctgctgaagctgggaagcctccatcaggcggaagggggtgttggcatccttcacccatacgccgaaggataaaaacagcaccagccgcagtaccttcgtgacaaaaattctggaccagccgtcctgccggtccttccgataaccgatgagcagaccgcagttttcccggtccttccatagatcccaaaattccccagccagggtctgcccgtctgagtctgtctgaaaaacgtaatctgccccctgatccagggcatactggtagcctcttaaaatggtggctccatgcccctcattctccttgtcaatacctgtgagtcttggataactgtccatgcactccctgatcttttcataggtcttgtccttgctgccatcattgaggatgaccagccggctgtccccgcccaccttttccaccaccggataccactggcggatcacctggctgatattcgcctcctcattataggcaggcataataatatacaaacaatcatgtttcatagattctgattctcccatccagggacgtatagaccaggggatacaccgatgcgatcacatcctcccggcagtccctctcttcaaactgctgtccttgttcatagaggatcaaagtgatcctctcctgctccaccaaggtccgaagctcctgggaagattctgtggtatacatcttcaccgcctgttcggcccgatagtaggtgtcatagcctgcggaccaggcataatagggccagccgcagtacagcatagctcctgacagtgtcacctcattcatactgtattccggggtgaggaccaggtccttgctgtctgtatgttccttcagccataaggtcacatcgctgtttaaatccacagagaccctgtggtttttatcattgtccagaaggatcaccacaaagtcataggcaccggtaatggtgagaaccactgccaaaacacaggccgccgcctttgccgccgcttttctcacagaaaacaggctgcacactgcccaggcccacaaaacgctcacaaaggcataggaaatcataatatacttatgattcaccgcaatatctggtgttagggatataaaaaaggcaaagaaaaacggcatcaggaaactggccaaaaggcatttctgcggcctcttcagtacaacagccagaacgatcagccccaggaaaaagatcccgctcatccaaaacaggtacacgatcactccagacaaggtcttgtcctctgccagaaatccccagaaatacctgagggaaaatgcggaatctctgataaagatcttggtctgtatgagagaaaatgccactgcctctgctgccatcaccagataatccagtttgcccagagaaaagaaggccatgccgcacatgatgagcagaccgccgatgacagccgccccattccagaaggaagccaggcccacaagcatccctgcaaacacagcggtctccatattcctgcttgcccatgcctcttttgaaaaaagaagcttcttcagccaggctttccccttgtcctgcaacaagatacctgccttcatccaatcccagaacaaaagtattgccagggtgatgatcaaaaggccaaaagccagatgtctctgattcagatacacattaaagttccacagaccccagttctcatttgtagtatacccaataaatgaccggttggtagttaaagttttccacagatctcccgcctgaaaatgctcccaggcaaaccggaaaaaggaacctgagctgcggaaaaagaaaaacaccaaagtgagggctcccacagaaaatctatgaaagatccggaaggccacagtatataaaagcatgataaaacccatcagacttaagatgctgataagattaaaggctaaatccatgcgcaggcccagatattccagatttcccgccagaaactggaacataaaatgatatttcacatccgaaccgccgaaatgtggatattgggtgggaaagttatttccccaggaaaaggaacgcatgacagccgtgtggggcgcatagtctccaaacaccgtaaaaccggaatacaaatgtccatcctttatatggaacacataaaacatgcaggctgtgacaaaaatggccactatggcaaagagcacaatctcctttttcatacggcttttgctgctcacccacacaggccgctgagggttcctccttgccagcgccacaaggaggaccacccccagcactcccatgatgagattcccatagaaaaggggatgcctcttatccagatacacgctaaaaaaccaggagatcaaatacgttccccaggtaagaaacagcgttccggtaccgaaccaggcaggcagaaggaaccagatacggttctcctccttctcccaatttgtccccgtattggaaagcaggcatcccacaaattcttttccaagcaatatacccaatgtcaaatacacgaatcctaacatagtaactcccttatttgtccgacaagcgatgtcccccttcatcgttcctattctgtatttttccccggcggacccagcactgtgcttccccgcctccgctgccggctgcggaaggcctggactgtgtccataagtagtttttgttccataactagttttcattataacaaagaaccctggcagtgaaaagtaaaaatctgtcagttctccaaatatacacaaattccatccgctacagactctgccaccttctcctggtattcttcctcttgaagcagcttcgcttccctggaattggtgaggaagccgcactccacaatgttcaggatactgctgctgcgcttcagcaggtagtatgtagcatttccctttgccaccctggcatgctccacggacagcttctgattcatagattcctggatacacttggccagccgctccccctcgggagaatcccggtaatagaaaacctgggggccgtacacactttcatcctcataactgttctgatggatactcacagccagaagcggccggctctccttgatgagggtgatccgcttctgtagatcctgtgccttctggttcttggtgttctcctcatagagaccgtagtccccgtctctggtcatcaccaccgtgtaccccttttcctccagaatcgtctttaattttcctgcgatcaccaggttgatatccttttctttcaagcctccgatgccgatcattcctgggtcgctccctccatgacctgggtccacaacgatgatccccttactgttatcctgattcactgcctgggcggcttccctggacaacaggaaaaagcacaccaggagaagagaggccatgatcacttccaatattctttttttcaatgcaaaacaccccttaccatattctttaaagtatatgttggagggtgttttttacatgtcattgtttttcttttgtttactggagattatctgtgataacctgccatatgtccggagtctcaaagcccagcttccactctgcaactcctgccagctggtatttggggatcagcttcacttttgccgccacggcatccgcatcctccagccaaatctggcagcggctgccattgtcctcatattccccgtaggtctgccctgcatcctggtcccaataggtctccacttcatggacacggataacctcctgggcatcagccataccgatggcctcactctctactccgcctggcacctggcgccacactctggtgtagaaaggaatgccattgatgactctggatgccggcacctcatcaagggtgtccttaatccccttctctacccagggaagggaggccacaggacctgcatcagagcccacatagtgctcgtcataacccatgatgatcacatagtctacaactcttccctgctcagccctgtcataatggctggtaaaatcctcgggaaccggattatccacagacaacacaatgttgtttttgtgagtctctatggaaagctctctcaaaaactgcagaaaatgaggacctgcgtcttcgctgaggttttcaaagtcaatgttgatgccgtccaggtcaaactggatggcgtagtccaccagctggcggatcacattctgcctggaggtggtattggaaagcacggtggtggtgctcacctctgcattaaagttgtcaatgagtccccacacttcccagcccatgctgtgtgcagtctgaacgtagtcggtggtggcgatgctggaaatagttcctgcattgtctgtgatggaaaaccaggtgggggagatcacattcagtcctgtcacctgggcagtggcgtctccaagaccctcattggccagctcagaggtcacctgatgccaggccagattaatggtgtgatctctggaaatataagagtaggactctggggcaaagtccctgtccaccgtcatcatttccggaccactcaccttcttcttttcaatatatccaacaaacccatccggggtagccacctggatccaatcctccagatcctccataaaccatagctgctggccagactccacctctgtgagaacgccggacttgatcccgccctgatatctcacataaccgtccttctttacagtgaccatctggacatcctcccactggtattccaccaccagacggttgggattctcatatagagtggcatctatgtccgtatgctctttcacaaaatccgtacttacataaacattattatttttaatgatgactttcccggattctccctgggccggctctatgatcagctctgtggggctggcgtagagaatctgactgccctgggcatcccaataaaatgcctggttcaatgtattttgcacaatggacacaggcaggtaggccttgccgttttccataatgcctctgtcctgaaggacttcctggcccagaactaagatcagctctccatcgtttacagttccatagtattccgttaaatccatgcgttccttggacggcatatatttgctcaccagatgagtgacagctcctgcgccgccaattaaaacaatcaacagacacaccacgattacggggatagcctttttcttcataatggtaaaatcctttctatgcgatagttatctaggccattataacacattttctgaagaaatcattacaaaattcgactttttatatattatttataattccatacagccattttaagcaggatctggtgctttccagcctgtaaaaacggcctttttttgcaggaatacctgcgggggcggttatgtaagaggggaacttcctggatcccccgcagatatttttccctatttttcctgaatccaatcaaaacccagctggatcagttctcctttctcattttccacataatctctcatgtaggtgccctcctccgcgatggtacaggctttcgcgatggtgcgggcgtcactgggttttccgttcagcttcaggagtacgccatccttctcatacaaggacagctcctgctgcaacaggtccatatccatggtaccgatcaccttctgtgacatattttccctgcttgtctcctcctttcttctggatttcattagaaagcacctgataggttctggaaaaggcggagacacatgggtttttaatcttttggaaaaaatcatcgtctgcggcaggaatgccgtctgataggattgtgacaatgatatcatttataaaatataagatagtttatgcgaatgcagatactgtttacgggttgcgggtttctctgtgtcccaccttttcttatggtttattatacattttttccaggggtaatcaaggcttttgtgacatttatgaaaaaattcccatttcctttccaaatattttataaatagggaaattgaatttctttacatattcctccactatggtatataatatatcatgtatatctgtttgtaagagaattttaacaggtcatggactatagaataggatgtgatattatgaaaatagagaaaatcaatgagaatcaaatccgctgtaccctgacaaaggaagatctggagaccagacagatccgcttgagtgagctggcctacggcacagagaaagccaagaagctgttccgggatatgatgcagcaggcccaggcccagtttggctttgaggcggacaacatcccgctgatgatcgaggccattcctcttaacggtgaaagtgtactcctcattatcacaaaggtggaggatcctgaggaactggacacccgcttctccaaattctcacccttccgtaaaaatgagggggacgatacggttcatttcgacggagctgacaatattattgatattttccagaaattatgcgaggcaaagggtaagtccgcagggaaaaagccagccgcacctgtgtccaaggaacccacggaaaatccaaagaatgcagaagaacctggggtgaatctggtgcacctgttccattttccaactctggatggggccattgctgcctcccatggacttcagggattttttaagggtgtgaattccctgtataaggattcccgtcaaggcgtgtattcccttgttcttcaccaatccgcttccaccccggaagaattcaacaaggtatgtaatattctttctgaatacggaaccgggaaggtattctccctggcaggtgaggctcatctggccgaacatgcggagatcatcctttcccacaatgccattcaacaattagctgaactttaagtccatgcttttaaaagctttttgcagcagaaaaggtgcagtttcttctataaaaatagagagaaaccgcacctttatttatgctctgctcttaattttctgcagctaagaaatcattgatctgtgctaccaaaatatctgcatccagtccatgaaccatggctgcctcttccagagactccatctgtgcagacgggcatcccaggcagtgcattcctgctctcataaggattggagcaatatttggatttaatttgatcaactgaccgattaacatttcttttgtaacctgtgccatattgtagttcctcctttatttattttgaaccttcgcagcttcttcagctagtctccattataatacctttttcttgtctcggcaacgcccttttacaaatttcttccggtcagtttttccagtagtttttatggatgttctataaaaagtgcttgtaatctctccagggatatattagaatgtgtgtagaacccattagggctaaaaagagataatcaaaggaggattttaatcatggcatatgttattactgacgagtgtgtaagctgtggaacttgcgaaggcgaatgcccatctgaggctatttctcagggcgaagatcgttatgtgatcgatcctgacgcatgtgttgactgcggaacctgcgcagacgcatgtcctactgacgccatcaaaccaggcgaataattcaccggaacaaaagggctgtccatttcattgaggacagccccctttttgtatgattgaattcttaattcctgactaggtttttttcattttttcttcttctgcgcaccccggactccactgctgccgcggtttccctgcgggccagctggtgtctgcggatagtctcatccagagaacgatagcggtgctccccctcttccttttcccgaagcccctgctggatcagacgttccagtatggactggaacagcagaaccttctcttcatgctcctggccctcctggacagtttcctgcaaagagtcctgcctgatcgttgcctgagaagcattgtcctgcagagcctcttcctgtaacacagtcttctttaatgcttcttcctttaagccttcttgtttgagaacttctgtctgttttccgaccgcttcctccatcccttccatgggcagaagcttgatcttgctgtctgagcttcccggcgccttcactgatatcttagggatcagctctttgatcgcccgaagctgcaggccttttttcttcagttcctttatattcataaacatctgaatatcatatccggtgtagtagcgatgcccctgttcgttccgtctgacccttaagtccagctcttcttcccagtaccgaagcacagaatctttgactcccagttctttggccgcctgggaaatggtgtaatgtgaatggtccatactacccctccttatgaaattcactgctttcattatatagggggttccagtcaattgcaatgagattcgttcgacaggaattggcacagctccatagcaaaaacgactcccttgaagaagggagccgtacttgggcgatatttgtcaggactattttttcatatttacaaactgggtgtacctgggcagccataccagctccacagtgccgatggggccgttacgctgtttggctatgatcacctctgcaatgtcctttttctccgtatccttatgatagtagtcgtccctgtacaggaacataaccacgtccgcatcctgctcaatggctccggattcacgcaggtctgacagcatgggcctgtggtccggcctctgctctaccgcacggctgagctgggacagggcgatcaccggaacgctcagctctctggccagcgccttcagggaacgggagatatcggaaatctcctgctgcctggaatcggtcttgccgcttcctgtcataagctgaaggtaatcgatcataacaatccccaggtcatgctccagcttgtattttctacacttggagcgcagctctgcaatggagatgccgggagtatcgtcaatgatcaggttggaacggccgatgacatctgccccttccaccagctttgtccagtcctcgtcccggagattacccgtacgcagattctgggagtccacccgggactccatggccagaagacggttcacaagctgttccttactcatctccagggaaaaaacagcaactgtcacatttttcttaaaagccatatgctgtgcaatgttcagaacaaaggccgtctttcccatggaaggacgggccgcgatgagaaccagatccgagggctgcatgcctgaagttttataatccaggtctacaaagcctgtggggatccctgtgacactccctttcgtctgggaggccatctcaatcttattcactgcattgagcaccacctgctggatgggcacaaactctccggtggtccggcgctgaagaaggttaaagactctcttctccgtctcctccaaaatggtctctgtgttctccttatccagataacaggtgttggcgatctcttctgtaactttaataaggcggcgcaggaccgccttttcactgactatgttggcataatatttcacattggcggaggtggggaccgaggtcaccagatctctcacgtagtccatgctgcagatatccgggggcaggtccttctccttcagcctgttctgaagggtgatcagatccaccggttttccttcattgcacagctccaccatagcatcaaagatcacaccgtactgattctggtagaaatcctcgctggtgagaatctccgacgccaccaaaatggcctcacggtccaagatcatggagccgataaccgattgctctgcctccaggctgtgtgggaggattcttttaatcagggcttcttccatggatgcttcctcctaagtacagcaccttactgtgcttccttcacaaataccttcaggcttcctgtaaccttgggatgcagcctgattggcacctgggtcacgcccagaaccttaatagggcttggaagctgcattttcttcttgtcgatatccagatccagctgttccttcacggcctcggaaatttccttggtggaaatagagccgaacactctgccgccctcgccggtcttcagatacagaacaatctccttgtcctccagattcttggcaaaggcctgggccgcctccagattctcctgggccacccgctgggcatttttctgctgcagctttaaatcatttaaattcttggaggttgcctccaccccaagctttttgggcaggatcatgttgcgggcataaccgtcgctcacatttacgacctcacctttttttccaagagctttcacatcttccaataatattactttcattctgactctcctttttgatccaattcatcaataatctgttctatcatcttggtggtctcttccacagatgcctttacctgtgcgccggcgatgttcatatggccgccaccgcctaatttctccatcagtacctgtacattcacctcatctatggctctggcgctgatataaaccacgccctggtattccgtaaggacgaaggaggctttcaccttgtcaatattcagcagctcatttgccgcctgggcccccaccactgtggggctttccagcccgtcactggggcatacggcgatggcaaagcagcccttgtaaatctcagccgtgcggatggcctccgcccgtgccttgtaggaatcgatgttgtctctgagcattttccgcactctggtcacgtctgccccgttccttcgaaggaatgccgctgcctcaaaggtgcgcacaccagctctggtggtaaaattgttggtatcgatcatgacacctgcgtacatactgtccgcctctgcattgcggatacggatcccgtctgcaaaatactgaaggatctctgcaaccatctcgcaggtggaggaggcatagggctccacgtaggaaagcactgcattttcaatgatctcactgcctcttctgtgatggtcgagtacaacaatggtgcgggtacgatagagaagctcctcgcactcggtataactgggtttgttggtgtccaccacaaccacaaccgtgttgttgtccaccagctccttggcctcactgctggacagaaacatatttgtctcatagtctgggttgtccataaaggctgacataagaggccggatagaggtggtgggatcgttgatcacgatgtgcactggcttgcccagggtttttcctgcccggtaaataccaatggctgcgccaaaggcatccacgtctgtgatcttatgccccatgaccaccactctgtcccgggtgctgataaattcttttaacgcctgggccttcacacgggccttcacacgggtgttcttctccatagtctgggactttccgccataataggaaatgttgtccccgtccttgatgaccacctggtctccgcctcttcccagcgccatctcaatggcaatacgggaatattcataattctgaagataggttccaccattcactcctatgccgatactcagggtgacactcatctcattgccgatgtttactgtctttacctcatccagaatggaaaacttctgttccttgagccggtccagggagcttttcttcataataagaaaatacttgtccttctccagctttctcacaagcccgtcataacaggaaaaatatttgctgatcttccggtcaatgagcgcgatcaaaagagaacggcggacctcctccacactttccagggcctcgtcgtaattgtccagataagctaaagcagtcaccagcttctcatcctcccgcttctggatataatcccgaagctctgtatcgtcgaaaagagataaggctaccaggtagctgccctctccttctttttccagaagctggctgtctttaataagggaatccgtatcgatcttctgtaatgtaccgcggaacgtccttcccccaaagactatgctgatctcaccggacatttcctcttccagaaggatttctttgctgaattcctgaaaaaccgtgctgatatgacggtcaaaaaactgatcttttccagtgagtcccgcaaaggaccggttggaccagatcaggtttccctctctgtccataaggcaatagggaactgccatgtcattcagcatctgcttctccagatagttatactgattggagaaggccaccagctcattcatgatcttgggatgataggtccgcagggtaaacagcgcgatcagcagataggctgcgattcccagggacataagaagtcctgccctgacattgataaaataaatccctacatttacgatcacaagcaaaactgccaaaaaaatgggccactgcagaaatctgcttaaatgtccttttaattttactttttctttcatatccttcactttcttacttttgttaatcttcccttgttttccgtgaagctccaaagcctgccttgcggctggccgattactaattattataccagacttttattgtttgtgcatcatatattttatactgcatcatattagtatcattgaaagcccactgatttagctttttcattataacatttttctgggagataacaacatttcgtactccagctttggaattttatcatgtcctcccggcaccttccccggactgcataataacgcaaaaaccgccatctcgttggagatggcggccgtttcctgcaaattagtcctgaatatatggcatcagggcaagatgacgtgctctcttgatggcaacagtcagtgctctctgatgttttgcacagtttccagtaattcttctgggaagaatttttcctctttcagaaacgtactttcttaattttgcaacatccttgtaatcgatctcattgttatctttgccgcagaatacacaaactttttttcttctgcgtccgcctcttctcttcatgggagagtccggtctttcgcctctattgtaagccatgctggtttcctcctatctacatttctcagtttgatttaattaaaaggcagttcctcgtcaattccatcaggaatgttcataaaaccgtcagcacttgcagcgctggggcttggcatggacggtccggcgttcatgggctggctggtctgaggatgagaagcagcatagttatcactgctggccttgctctccgcaaattcctgttcatccacaaccacttccgtggtatacaccttctgtccttcccggttggtatagctgcctgtctgaatacggccgctgaccacgatccggatcccctgatgaaaatacttctctgcaaattccgcagcacgtccgaatgccacgcaggaaatgaaatctgcggtagcctctccgtcccggcggaatcttctgtctactgccaatgtatatctggcaattgccagggcattttctcctgcggaatatctgacctcaggatctcttgttaagcgtcccattaaaatgactttgttcataaaatatacctcttcttgtcaagactactattgaacgggtttcttaatggtgctttctaaaatccatcgtataaaatcttatgcgtctttacgaacgactaagtatcttaatacgttgtccatgatacgaacgtgtctttccacttccgccggacactctgcgtctgcttcaaactgaataaaatagtagaagccttcgtgcattttctgaatttcgtaagctaatttcttcttaccccattcttccacttctgtgatattgccgttgtaacgggtgatgtagcctttcgctttctctaccacagcgtcgcgtacttcatcctctactttggcactcacaaccaatgctaactcatacttgttcatgcttcgtttacctccttttggtcttttggccccctgcctgtccagggagcaaggatatttgaaaatatatcacaattggagattctaccataaaaaactgggcatgtaaagtggattcagggattttcctggatttttttctctaaatttctggtatttttctccaccagcttcctggtaaccatgatctggtggccgcagccctggcattttaaccggaaatctgcacctacccgcaggatctcccacttgctgcttccgcagggatgactttttttcaaagtgacgatgtcccccacttcgtattgaaatcccatagtttatgctccttttaccttaatttttgaaaagacctccccgatgggggcctggataagcaggtccgcataccggtccctgggggtgggtgatttgttgatcaccaccagatgagcccctctgtaatagtcaatcaggctggcggcgggatagacggccagggaggtgcctccaataatgagcacctgagcctttgctatggcatgtacggattcattgatggtggctgtgtccagcccctcctcatagagaaccacatcgggcttgatcattcccccgcaggaacaccggggaattcccctggagttcttcacataggaaaaatcataggatttcccgcatttcatacaataatttctgtatacactgccatgaagctccagtactgccttgctgccggccatctgatggagattgtcaatgttctgggtgatcactgcccgcagccttcccgcctgctccatctgggccagctttaagtgggctgcattgggctttgccgtgtcacagagcatcttatccttataaaacctataaaactcttcaggatggttcataaaaaacgtgtggctaagtatggtttccggcggataatcataccgctgatgatacagcccgtcctggctgcgaaaatccggtattccgctctctgtagatactcccgctcctccaaaaaaaacaatgttatcataagtatccaccagttcctgaagtcttgcaatctctttctccatctgaaatccccctctcgttttttctcgctattgggtgttgtccgcgggcaggctgtcaatgagcttaccctgaaccacaaagcgcgtggcctcatttcccgtacaggtagagagggtgacgatcttatctttcacatcaaaaggaacatcctccgtaactacctgggtattctgcttcatctgctgggtataatccaaaaattcctgtccgggtcccataaataaggtataggtatcgctgtctacaggagtgctgtaggcggcaaatatctcatacctgtagttcttctccggtgtgagtatccagaaatatttactggagtcataagtatcctgctccagaaaattccggagctttccaaacatggacccgttctgcatattgtggccgtaaaccaatgtattacagtcaccgaaatctccgctgttctcataatcaacgaatatggtgccggcgaaattataggtgccctcataggtgcggtgaagatagtaatcattgtcttccccccggacaaccgggtagctgatgtcagggatggcttccacatagatccagcccaccacttcttcattcacattgcgaagaggtgtaaagtcaaccgtgatgggaggcttcagctgggttccctgctcctcctcctggcttttggtctccgggtctctctccgttaccgcaagctgttccagggcgttgtactcatccgtaccctttttatattcctggtaaatatgcagaaggttatagcctgcaaaacagaacactgcaattgcaaccaaaagaaccagggtcagcacataatcccctgcggtctttttccttttctgtccattctttttgctcataaattagtctccttactttcttttcctgccagaaacctactctgattataccatcattgtctctaaaaagaaacagccggaacaagaaatgttccggccgtatagcatcgcttgtaaaaagctacagagtatctgttttgaaacagaacctcaataaacattaagtccatttttgtctgataaggcatacattttaaaactacttaatgtggcagcatccctaacatgtgcattgtatattttttcatattcgctcttctggttggagagggtatcaaacttcccattctgtaccttatacccatccgcaccgttatcaatatagtatgacagattcagtttatttccgtcccacttataaattgaccactcatacgttcctgaaccacctgcaccatgcaaatgtccatgctcaataatttctttttgattcttatttattctgtcaataaaataataattcgtaccaactagcccattttcataagtaaatattgctgtaatccccattgttgttgaataaaggaataactctggtgctccctggttgtctaagtcataaataaaatacttatcaaatctatacgagtccccaaaatatatcggcagatacctcaaatccatgtagttttctgcaagtttccaattatctaaaatttttgcatactcctttttccatgtagaattctcgactgtggggtcacctcccgaagtaggcgcaataacaaacacaaacccagacaaacgcccatttttgtatttcggataaaaagtccacgcattggaattcgagtaggactttccatcattgtacgttttcatgtgatactttataaatttactttccatctgcgctctggtatcaccaattttcgctccataatacctcacatatgtatttccagtgttcgttattcttaaatattcatttttctttgtattataaacagcattcttgcagccgcctattatcattctctgtccgatataaaagtagtccgaatatttttcatgattacgggttgacattccacctacagcgttctttatagccaccgccgctttttcatgggtatccgcctttaaaatatagtccataatatcaatataacttcgcactctggcacatttcacatcggaaaacactccatattttctaacattgtcaatagaccgatatgcccgtattttgtaataacatttgttcttattttttacagaactgtctgtccaagagttagaattctttgtcaaagtcttgatataagtaaatatcttgccatccgtactacgatatatttgatacccatcagcaccagaaatttttctccaacttatttttaatttatttattgaagcattcccaactgatagaatttggactttcggattatacgcaattgtaaaagctacatttttactgcctgtataatttcctattcccgaaattgtaatgacagctctccctaattttgtattattgctataagaaagtttataatctacatttaatttcagctgcactccctgatagctaatcactggattcggtttaatcgctgcccctgtatatgtttttgtaccaatactatttacttgtgtatttcttatatcgattcgctctgcctgcttcacagaaaaagtatacattccaatatcaccggaaaccactttgcttattactatataagaaataccctccggtaccgatatctctctacttccactataaccgaaatttccttggttatagccgccctcacttataaagtcttcaaatatattgtgtccactatcaaaaaattgaatatatatgggaattgtactttgatattttattatgtatttgcccccggaagatacagggatcttgtaataatcctgttcgcttccgttttcatctggaggcaggattccgctcactgtctttcctccggaaatacccaatgcatcagcaaaactatggttactgccctcatccgtgatcaattcctcactaattttaatatctaaagtacagattcctgacgttatgctaactggcaggttttcatccggtccatatgacaaataatactttcccttatttagataaatttcctgagatatcctctctttgccgttcaacctttgtgacgaaaaatcggccaaaatctttttagactccgaatataatttaaaataatgactataatctgcatccgatgagatttccatatgcgccggagccgttaatattattttgtacgattccgcagatccacttctttcatcaaatccatgaaagagtcttatatctgtaggaattgttaaagtttcctccgaccacccggcatatagagtatggtcatactctttctctaccctactcgtttttgatattatcttttcaccattcagatcactataccatccctcaaagcaaaatccaatcctacttggtctaggtaaacttccatataaatcccctacagttacctccttaaatgcagcattaataaaggttccccccatagaattaaaggatacacggaccttgttacttttccaatgtgcatataatatatgatcctgttctgagttcaccatggattctgccgttacctgcattcccccatttagctgtgtataccaccccacaaaactgtaccctgatttagatgtggacggaagatttttatatgaaaccggctgatttttatcgtacagtaccgaaatatttccaacctgataaccaccgttggcattaaacccaaccgtcaatatcgtaattttttttgcaatatgtctttgaatagccaggatatctgctgaattaatcaagccatcgttgttaacatcggccgcaatcgctgactgagatttcaatatccatcccggatgtttatgggctacttgattactttgtactgccgccacatgccgctgtaccgccaacaaatctgttaaatcaattttaccgtcattattcacatcaccaaattttacagttgtattagaataattaaccgctccttgaacttttccgcaaagaccaatgcagattacaagtaaaagtatagatatcaaacaacatttcgtctttttcatttaaatctcctccttatttttttcttaattatataataactacgttaaaaaatccatcacgtcagctactttctctgtgtaggttttggggcctttctcccaccgccttatatacaaaaagacctagagctaaacgtctctagacctttcacaaaaagcgggaacaggatttgaacctgcggccttcgggttatgagctcatattggcgtattagatacacgttggagcacctgtcgttgaactggggagctaattgcgccaacctagtaagaatctttcatatttgttggcagtcctcatatagttctcgctgaacctgaaggtgaacaaacaaagaattgtgttggtagttacatctccataaattgtgctggtgtaactattttgaggtttataattccagattcaataaaatctttatctcctgtcagcagtacatccacatttgctttcaaagctgcccgaagtattggtctatctgcagcatctcttatgatcgcttccgaatcgacttcttctgttggagtgggcacaacctctatagacaataaggcaatagaaagaaaatgttccagaagtgatatcttctgtggaaatttccgtttaaaaatacggcgcatttcctcaatattctcatagcccctcaacttctcttcttacttcatcaacaagctcattaacagcttcctcggaatccaaaccgctatccgttgcttcgcttttcagccctttttgcagcattttcattgcgtatacagccgcatttatcatgacaacttggttcccctggcatataagcgtcactctgtcgcccgtacctaatcctaatttattgcgaatttctttgggtaaagtgatttgtccctttgccattacttttgcattatcaacaattaagttttccatgagaatttaccagctcctttctttggtagggattaccctacttttcccactttcagtatatgctattttataagatttatcgatagtctaatgtacgttttcagacaatccctccctgccttgcaaaacggataatcaaatgtgctgtagattccaggatttcctgatatacctgtatttcatcatcggtaaagccatctatctctttccattcatagccgggcagatagcagtatgctgaataaaatccgttggggactggcttttcaatatatacctttactttttctttgccattctcgttaatgatatcagaatggacaatctctgtctggtcttctaattgtaaaaaaggatgcacaatctgtatccctccttgactgttaagataatcatagatgattgatttaaacctatggttttgtgagaaaggagtcctgtgattcttgtattctgtaattacttagtgcaagctttctgtcatccatacaaaactaccccctctcttttaacattgtcatagaatggcaatgctcccagccaataattaaaatgagcctcattcttgataacaacactgatatggataaaatattccatttccagttcaaaagcaatttcaaagactgaaggttccagcttttcgatttctttatcggagagtgtagtgagaagcataatatcaatatcagattcttttgtttgctctccccttgcataagaaccatacaaaatcacttttgtaagatagtcccctaatatcgctcgtactttgtaggagaaagcgaacagcaaattttggatatctttacgttggacaattctgtcatataatatttgaggcatccttcaatccctcctccgctgatcattcatgaaatgcacgtttttgtatgtgctttcatctttcttaattatacaatgaatacgttgagaaatccattagatttataaaagaaagccgatacactttgtggtagtgtatcggctcaatgtagacgttattgcgcatgtttctttatataacaaggcctggagattagtacctccagacctttcacaaaaatagcggggacaggatttgaacctgcgaccttcgggttatgagcccgacgagcttccgaactgctccaccccgcgtcactaaaaatagtataaaccttacagaaagatttgtcaatgcccccttatttatgatataatattttgcagaaaaatatgtatgaaaatttttccatggcttaacaggcgcacagcgccattgcccaaagggcacgactatacgtgatacccgaaagggtatacacaaaaaaacaaacagggggattataccatgcagaaaaagaatttaatcgtgggacagtccggcggtcccaccgcagtgatcaacagcagtctctacggagttgtatcagaagctctggctcatccggaggagatcggtaccgtttatggtatggtaaacggaatcgaaggcttcctcaatggaaccgtcctggatttccaggaagcacttccaggggacaagctggcctatctgaagcacacaccaggcgcttaccttggctcctgccgctacaaactgccggaatccttagaagatcccgtatatccggaattgttcaaaaaattcgaagaaatgaacatcggctacttcttctacatcggcggaaatgattccatggataccgtaagcaagctctcccgctatgcagaacgtgttggaagcgatatccgtgtcatgggcgagcccaagaccattgacaatgacctggttctcaccgaccacaccccaggcttcggcagcgctgccaaatacgtggcaagcactgttcgtgagatcatcctggatgccaatgtatacgaaaagaaatccgtgaccatcgtggagatcatgggacgtcacgcaggctggctcaccgccgcaggtgttctggccaggaaatatccgggggacaacccccttctggtgtacctgccagagaccagctttgacgtggaggaattcctatccaaggtaaacgctgcctttgagaaaaactgcaacgtggtcgtatgtgtatccgaaggtatccacgatgacagtggaaaattcatctgtgaatacgacaacaatgtgggcgttgacagctttggccataagatgctggccggctgcggcaaatatctggagaacctggtgcgcagccgcctgggggtaaaagcccgttccgtggagctgaacgtaagccagcgctgttcctcctccatgctgtcagccacagaccagcaggaagctgtagccgcaggcgtatacggtgttcaggccgccctggcaggcgagacaggcaaaatgatcgcctttgtccgtggcactgcaccggacggcacctacaccatgacctgctccttagaagatgtaaatgacatctgcaacaaagaaaaaccagttcccatggaatggatcacagagaacggctccaacatcggccaggaattctttgattatgccacccctctcatccagggcaaggtggacgttcccatgggcgaggacggacttcccgccttcgtataccggaaataatctgtatctgagggaaacggcttcacccaaaagcccatctcttccttgggcaatgccagggaagcaaaatttcccgtgatggatctgcttcatgaaaaaagcctcacggccacatgggttgttcctggaaccatacatccagaaacaccccctgtgccggaggctctttttatgatatagccgcctgttacatggcggcctgccactccctggcaaaaaggaagctgacgccagttttttatgtattcagtgtcttatgatcttcctctaatttctcactgattctttttttttgctcctcgtccgcctttctctcatcccgcccctttggaaggataatattcagaaccactgcgataatagtagccaggaccaccggagattttccgaaaatggtggtcacccatgcagggaaggtggacagagctgccgtagcctgagaaacacccacacccaaggctgccgccagacctacaatggaagagttcctgtaatccatctctgcggacgccaccagcttcataccagtcatggcgatggaggcaaacacagatacggtagctcctcccaatacacactgaggaatggtggtaagtaccgcagaaatcttagggacaaagcccgccactcccaggatcactgccgacagacccagcacccaccggttgatcaccttggtggttgtgacaatacccacgttctggctgtaggtggctgtgggaagccctccgaacaaagcccccaggatattggtaagtccataagccacgatcccgttctgaagctcctggtccttaggcgtgcggtccatggagccaatggtagtggctgaatagtcgccgatggcctggatggagttaatggcaaacaaaataccgatggccacacaggcagaaatctcgaactttaccccaaagtgaaggaactgaggcatctggaaaatcttcgcctcacccacactggagaaatgcaccatgccgaagggaatggacaccagatatcctgccagcatgcccagaagaatggacgccagcttgaaaatccccttggcaaaatgattcaaagccgtcacaactcccagagtaaagaaagcaatgagccagttctgccaggagccataatcctcgcttcccacacctccggccatataattgatggcagtgggatacagagacaggccgatggtgaacaccacggtccctgtgatcagcggagggaaaaacacccggatctgccgtaccaaaagtcccatgaccacggccaccacgccgcccacgatctgtgcccccatgatggtggcgatcccgtagccctctgcaatggcctgcatactgggaacataagcaaagctcacgcccataataatgggcagcccggagccgatggcaaactttttcttcttacctatgggaaacaactggatcagggtggaaaaggccgataccaccagagccgcctggatgagcagcaccttctcactgttatccagtcctccgcttcccgccacgatgatcgccggtgtcacgcatcccacgatcattgccaccacatgctgcaaagccaggggaactgcttccgaaaatcgtggaatcccgtctgtttcaaaaatgcttcctcttctcatgttatcctcccaatttttatcccgctgtgttccctctccttgagaacgctcctcccttgaaagggttttggctgtcacggggctttttactatggttctattataccaaaggtggtatgcaaaaacaattaggttccctaattttttttgttttaaaaaccaccaataattccccttgatttttgttagtttttttatttgataagaagaagccaccacagcttttgccccatggcagaattttacccgcctcagcccagcagttcaaaggtatgatacaggtccatctgtccatacccccagtccggattgggataccggaaattctctgaccgccttgcccccttgtagagataactgcccaccgtgtagccgttgagataaggggcattgttccgtaccacagcccattccagcagaagggccgcagcacctgccgtctgtgccgcactgacactggttcctgacacggtcccaaaatttccgttgagaagaggcgccagcacctccacaccgggggctcccagctctggcttaacggtcccatccaccgtataacctctgcttgcctgatagtacaagctctggtccctgtgattataggctgtgacagttatgcttccctgggcgtctcctggattggtgacagtctgatagggagaggactgaagaaaatacgtgtccggtgtgagaaacccttccacaggaagccacatatggaattccaccggatatttatagctggtggacacaaggatccgccagattccccccgccggctgaaaaaaccggataaacgcaagggtagacccgcttccaatctctgtctgcacataattggcctcaatgcgggttcccacaaacacaaaggacaaaacctgggtacctgcccccctggccgtgctgatgggaagcacctccccggtgggggactgaatggaaagctgatagttttccggggcagtcccccaaaattccagggtaaatccaggctccccactgcctacccgcagctctgcggcatcctgtcccttctccatactgacgatcccatgataatggtggcgggagctgccctcatttccggcaggcacacacaccacattctgggcaaactgactcacactggacacaaaccggctgagtacccccgcccctgtatggcttccctggctgcttcccagtcccaggcagatggataggggcattttcatctgctgtgctctgctcatggcataacggatagccagcataatatcattttcctgaaaagcctctgcctggggcggcagtaaataaaattccttgagataatccttggcaggctttagcttcaccaccagcaaagaggcctccggcgccgccccggaaaagccctcctcctggagcatatttcccccggcgatcccggccagcatggtcccatgtccgttctcatctctggaaggcaccacccccagaggattgtcagaccgcaaggccctctcaatatcctccctggtaaattcttttccatagggaggcacaaaattcttcatacagtcatacatgcccactttttcttttggaggctctccatccagagtctggtcccagattcccacaatcctgctggaatctccgtttcggaaaatgggattctgataatcaatccccgtttctgttaaacacctgcttctgctttcagcctctcaatggcatgatccgtctcatgaatcatgtcctgtatttgtttcatctgtgcaccatccttctgaaactcaaagctggtatcatatacagatttctcataatcctccatgcgctttcttaataggacagcttttcttttctccagctcccgatgtttcttttccaaattttctatttttttacggatatctgctctcccatctgcgctcatctcttgggaactgcacagtacttttccctgaagcggatgcgtggccatgatactttcatccttatgcgcttcttccttattctttccttttgcatttctaagcttttgtactttttcaaaggcttccctggaaataatcccggcatgatgctccttacaaacctcccattcactcctgggttttaagtggttccttcctcccacctcagtcctgtaatacttattataaaccatgtcgcctgcatacactggattcctaaggatggcacagatcgctgtatgttcccattgagccttcctgtcccctgggctggcgcttgtctttttgttcctggccctgaactgtgtgggtatgcttatctgctcctgattcagtaccctgctgatttccaccgaggtttttccttccagcgccagcgcaaaaatccttcggaccacctgtgcctcgtcctggacgatcacaagctggtgcctgtcatttggatttctcccatatccaaagggcgtatttccactgcaatattgtcccttcgcctttctgatctgaagggaggacttcacctttaaggataaatccttagagtatagatcatacatgaggcctttaaaggacgtatttaaatcccctgcctttcctgcataatccctgctgtcataatgatcattcaaagaaataaatcttatccccaaaaacgggaaaatttgttccagataggagcctaactctatgtagtcccgggaaaaccgggaaaaatctttgacaatcacacaatccacgcttctgtcctgaatcttccccagcagctcctggatccccggacgccggaaattcgtcccactatagccgtcatctacaaattcgtatacttcataatgtgtaaaatttttccttacataatctttgagcaaagacctttgacttcgtatactattactttcatcctgtatctcttcatcctcttttgacaaacgcaggtaaagagcaatgcgatagattctattcatccccttcctccaagtccagcaggtaactcttcttataattaaaaacaagctccacccgacggccgggatacacacgaatcctgctgatcaggcaggcagccagctctttatccagatctgcgtcattcctgcattttataagtccccggataaaatggtttgtcttttgcccttccctgtcaatgagcaattccttctcttccagttctgcagatttcttttgaagcaattccttttcttcctctgcattctctttttccttaagaaatacttccctggatattttcccttctttatatagaagataaagcttactgactttttggagcagcgcctcctgtcttttctctgtttctatgtatgcatttctggtatgcattttctttgtcttagtctgtctttcattctctttgcaataatcctttggacacagctttgaaagagaaaattctttttctaatagaagctttataattgtcatcaatgttttatgagaaattctttcacaggagcaggccaaaccgtctatcctgccccggttgggacaagaatagtaatcgtttcttaccacagtccccttggcaagtgtctttgtattggattgtctcacaagcggttttccacaccctccgcaaaagagcatatctgcaaatagattctcatcctcccgcaccgtttttgaacagccacggctattggaatatctgctctgccgttcaaaccggtgtgctgcctgataaaacagctcttgggataggatgggctcatgggtatacccagcactacagctctccttcccaccagcagcctcagggtctgtgtgttcttcctcatatccgtcttgaatcccagactggaaaagagtccctatataacaaggatttttcagcatctgcttgattgtttcatatttccactggtgtaaaaattctcctgggggacagtaaatctcccttgtgacatgatatacccctggacgttgtattctatttctatacaaatattctgcaatctccttataagtacagccctgcacatacatttcaaatatttttaccacaatgtcttttgtaatcttttccgggaagagcactctcttttcccccacctttttcacacagtatccatagggcgccaggcctcccgtgtaacttcccatctcccgttggagttttttagaaattctcactctctccccaatatccttggcataaagctcattgacaatatttttcaaattcatagacaggcgcatattttcatccaccgtatgttcgctgtcatacttgtcagtcactgcaataaaacgtaccttcataaagggaaatatcttctcaatatagtttcctgtctcaatataattcctgccaagccgggaaaaatcttttaccaccacacaattgatcctcttccggctgatatcctgcatcatctgttcaaaaccttccctctggaaattcgttccggtctttcccaaatccctgtagcagcccacaacttctatatttccacactgtgtgatgtactccttggcgatctcaatctgtgtgtcaatggattcttttttctgttcattggcatcaacggacaatctggcgtaaattcctgccctccacaccggctctgttcccgctgtcatcaccgctccctcctgggtactgaggcactgatacattctgctggaacacttatggattccactgctgtatccttcaatttacctgttatatccttctttccttttatattccttggcactgttactgcatctttcaatcttgcttccatcccctcctggagcatcagcgtcttatgaaattcttcttttcctttaaactctacatagactcttttattttcatatacctggatctggtttacaaagcttataagaacatcacgggtaagttctgtcagtttcattacagccttgaatcgttccagctttaccccagatgcagctctgttgtggaataactgctttctcatttcccgttgtttctgctgggctgctttcgcatcctcatacagcctttcatagatagcctgaaagctcttaaagtcatcttccgtgatcagccctgtttttaaatcctgatacagccctgcccgaagcctttgatatttctcctgttccctggcaagacgctccaattccttgtcagctctggccacttccctgaaatcaacctgcatattctgcagatgttccagttggctgcacacatccagaaaaactgccacataggtctgtactatctgaaaaataatttcctgcagttcctcctcaagaatgccatgtcttgtacatccttcacttttatttctggtggagcaaataaaatagaccttttctcctcctttataacgaacaatcctgcggaccatgggctgcttacaatccccgcagaacaagaacccagagaaaaaatgggcgcatcttgtacccttactagctctcgtatcaattgccaaaagcttctgaacggtttcaaaatcctcagccgaaacaatggcttcatgggttccctctacccggtcccatttttcttttggttttatcactgttttcttcaccttatagctgatcttctcatttctcccctgtaccatcactcctgtataaatttcatttgttaagattctcttcactgccactggggaccatttggcagatatactcgtgtgaaagcttgtggaaagcttttctccatgtgccctcttatactccataggagaaagcactccaagctcattcagcctctgtgagatggccagcatactcatgccttccatcttccaggcaaatattttccgcacaatatctgccgcatattcatctgggcagagtttatatttatcttcctctgactttttataaccatacacagtaaatgcccctatgtattttccctgctccctttttatcctctgctggcttcttaccttctgagagatgtcacggcagtaggagtcattaataaaatttttcaccgggaccacaagggctttggtattatgatctgctgtctgactgtcaaaattatctgtcactgcaataaaccgcacgtgaaaagccgggaaggtcttctggatcaaccgcccggcttcaatataatctcgtcccaatctggaaagatctttcactataacacaattcacatttcctgcttcaatatcacccatcatccgtttaaattccggcctgtcaaaattggctccggaatatccgtcatccacatacatatcaaacaattccagatcctcatgcgctctcacatatgccaggaccaattctctctgggagctgatgctgttgctctctgctttgctggttccgtcaatgtcctcatcgtcccttgacaggcgcagatagacagcagcaaagtacctcggttccttcataatgcgtcacccctaacttcagccactttcttgatatactgcttcatccggtcatttaaggtctcctgacaatccgaataaccaatcttcaccacataatccccaacccgcacaaggaagggatttccaacttcctgtacatacctctccaccctggccggaacagattttttcatatcaatatcaattttactgatgtccacaagtgtctcaggcctcacatcccttagatcgatctgctccatctcctgcaattcttccttagacaaatgcatattcatccctccaacactacaatatatttgcttgagggattgtcctatacacagcaattctcttacaatgaggggttctattttggggaaagttcagcgaactttccttttccctaagacgagaagaagtgaacgccgcccctgcgatgtcctatttttcaatatgtactgctcaaataattgtccataggaaactccatcagctttgaatccttctttaagaataggggatgatgtggatgccctttttttgatagcttacctgcattgcaccatgtcacgtgaaattcatttcctaaagcaatcatatcctccagacatgctttcaggtatgtacgcctttctattatcgttccccatgcggcccatattattggatcacggtcgcactgctccaatacccagcgaagtgcttccaaattctccttatgcagctttgtattgaatactttatccatatcatccggactcgttgccctctgggcatacaaattcagcataataaatgaatcaaagccattgcctaaggcaatcctgttcacagatttcagtgtgttatctaaagcatccggagctgctgtggatggattaacccctattgtgatcaggggcctttttccgactgtaccaagtacatatctgtaatcagaataaacatccggaatctgcacccatttctcccgatcatatccggcactctcgcttcttaatgatttcgcttcttcaaaggtaagtatcttcatgttcctgctttcttttgttggtatatgcatcatgcacctcctaattcaacctctgttaatctagttatcccgccttttttctgtgctgtggttgctcccttcctttatgaaaagagcctttatacaattattaaaactatgatagcatatacaatgttcaatttcatcaaattgcgtgtaattcgtgtatattttttcaaactgttaccacttaatctgaatgcggctgccattcatgatcggccagctttcccaagtctagcggattgtttttgacagcatgacaaatgagtgagccgttttatcacgcaatcaccttttatcacacacctgcatttccgtccatttccaactgcccattacttcataaattgacagtgaggaagaatggaaaaaatatgagttaaaaacactccatgagtatatcatagactttatcggttcaaagcatcggcaggcgtgtgcggaatttgcacatttggtgtaacttggttctctgaaaacgcaacatagtccatgttgtattgttctatccaaatttcttgcatataattaagccagaaagagaggtatggtatatgaaaacaacagttcaaaaaaaagaagctacagctatggattatctgggatttgctctttatgcttttggcggattaggagtagaaatcttgctgatgatgttagaaacaaatttgtggggaatatcaagcggcaaatggaccattatacaaaatgtaattcactggtgtgctacgtgtgtgatttggggagttcttgcttttcttttattaaagcaaattcctaaacagcactcaagaataaaaccgctaaatctggtagtagttagtcttattatgcttgcatctatggcttacacttcatttgtatggcatggctttaagcctattattgagtttacaaataatgggctcataaaattcgtaattcagtatgtttactatgcttttgaaagtatgctgattttattaattatcatattcggacagatgttttttgaaaaattagttggcaaaaagacaacgattcctgctggaagcattattctcgcgcttacatgggggcttatccatatcttgacacaagatatagacacgggaatttatgcctgcatacaagcgtgtttatttggttttgtttatcttgcgttaaataggggtgttacaatttcttatatagctattacattcatgttcatgttataatatctctcaaaggagggaattttattgaaaataaatgaatacatggacacagcgctcaaagaagatcgaatcgattatttttacaaaaaaaagacaaatgaagtacatgaagttctaggatttttgagaaaatacaatcacaaattgattgggaaaacagatagtggcgaaatcatcttctcacttaatgatgtatattattttgagtcagttgataaaaaaacatttgtttgtttaaaaaatggggttttaaaaatcgaagcaagattatcggagcttgaagatgcctattatgaatatggtttcataagagttaataaatcaatggttctaaacatctacaaaatagattctctcaaacctgagttaaacatgaaagtaattgctctattagataatggcgaaaaggtacaaattaacaggagctataagtcaaaatttaatttatttcttaaaaccatgaatgaggggagatttaacaatgaaattgataactaagaagaatataattcctattatttgtatcacttatacagtcttatccgtttcattaacaatatatgagatcattgtaaatggaaaaatgaaccctactcaattaaatatatttctctttttaattttaagtatcttaggcgtggctatattatcacaacattaccgttttgaaaggttttctccactaactatgattatcctacagtacgctattggtattgcggttattcttatttctttaaagactgcttcgttttttgtggatatacacccagatggttatagagatatgacattgtcattttcagttccttatatcattggtgcaattatctattatgttgctttacggatagaagttaagaaacaaaatcagctattagagaatatcaagaaaaatagaaagcagtttgagtagcctaaacttatggttccctatctcaatgccaatatgaaattccgccattctgtctcaaagaaaggaaactattataatgcccttaattattggaattcttgtgtgctatctaggtccgatagctattttgctacgtttgtatttcgctgatgagaaaaaaataaaagtgattcttgcaggtgcattaggatttattgttttttcaggtattttcagagaacaattcttaatcggaagtatgagagatcaatggtatgggttgaaagaaaataatcctcttctgtggatatttcttgcagcctcaacagcaggcatttttgaagaaaccggaaggtatttaacctggaaaatattttttaaaacacctccaagctggaacgatgccattctcttcgggttctctcatgcagttgctgaagcaatgacaagtgctggtgctttgatcttattttatagaactgagatgtggcaggcaaattcaagtattgaagcatatattttcgcagttgaccgtataccagcttacctgatacatataggcttttctatgctggttttatcagggatcctatacaatgacaaaaaaagagtatggtattctatccttctgcattcttttgttaatatgggactagcttttttatcaatgatactaaaaattagcaacttcgcacattttattctttctgccttattggggattattttcatagttatcaccatacactttaaagagaaatggaactcaaaagtaggcgtttaataatcccaggacggagtctcccctccgtcccatgggaatattcaacacctaaatggaatctgctgactcaaacatactgctgcttgtacgatcaccacaactgccaaaacagctatggcgtttcgtaagccctccaagtaaagttaaaagtaaaagaaagaataaatgcatgactgtctggtttctatgggaatctatatattcctgcatttgctccctggcattgtttaaaaagcatcagagcttccatgagtatccctccgctactttttacagttttgtatacgttattattcagattcataattaaggtatattgcatttgtactgatttttttcagcgagaaatccatgcttttaaaattcagtaatgtaatactatttttttcatgtacaatatatccaactttcgtattctcttctgataccagcttataaatatgggatttcttgtttggatctactttttctaacatgccactctcaagaatttcttcttgattgtatattgtaaattgtccatcttttaaaacaacgtatatattacttttatccggctcattaccagcactatatgtccctgaaaggcgaaatgatgttgttgtataatgaagcaaaacaggtatggaaactaataatcccaacagaataattacaaatacaaagtttctttttttcatattaaactcctttggcacttgcaaaaacagagcaaacagcaggatttgtactatttatatttaatatacatttattctacacatttgtcaatagtttattctaatactctgtagaacaattttgttcatgtctatataagtggtgagatagtcttttgtggaaacactctttaaagtaaaacgtaccggcttgttcccaacaccgtgaaaacaggtttctatgtccccaaaatcaaattaattcacacaaagtgcctgtcccatctcaaaatccccctgtcagcccgctttttttgcaggccaggatcagcaaaatccctttcatttgcaggctcctgccaagtttgacagcagcttaacacattccccggaatcaatcacagcaatgagtgtccccttgcctttcagattcagataggagtgattgtggagccttgtgatcccggaattgttcagggactccacatccatgtaggtatacagcttggggatggcattataggaataattatttacctcaagctggggaatgtctgtaagaggcacgtaaatgactgcatacaattcattgatgatctgaaacatatgatccgaataatagtccagatcaccgttcacatttcgattgtactgaacaataaaatccccgaagtactggctttgggccggcggcaccaaatcctgtactccagggcttttcatcctgcttccattcatttcatttctattgtcataaatctccggcatgttcgacctcgcaaccgtctttttgtaaagactattacaaagcctgaccggttatacctgttttccctttcttttttctgctgctccccgccacaagaggattccaattcctgctgccagggtgaaaactgcaataaactgggaggtggagaaaagacccacactgcctctggccagatctccccggaagcactcaataacaaaccgtcccacactgtaaaagatcaaataccagcctgccacctgcccatgggccttctttctggaggcaatccataaaagaataccgaaatgtagaaagttcagcacactggaataaatctgggtggggatcagagggatcccgttgggggcaaaggcagaatcgtgaaaggttatactgatggggcaggaggttccttccccgtagcagcagcctgccaacaggcagccgattcggccaaagccctgagccagagccacagaaggcatgagcaggtcaaaataagcccagaaattcagcttcttgatcctacagtacaaatatccggtgagaattcctcccagaatccctccgtagaccacaaatccatcagccaggtccaataaaatggatggatctgtgaggatctctctccactccgtgatccagaacagcagcttggcgcctgcatagcctcccacaagacaccacacgatgagataaaatacctggtccccatccagcttatattttttcgctctccattgagccacaaaataagctgcgaaaattcccagggcgatcataactccatacccgtacactgtaaacgggcctatggtaaacagttcatttttcatccataacctccttgctaaattttgcccacgcattctgtcagtcttttattcacgccgctgctggcctgaaatgccccaacggctgcatcctctgtgcattctccacagatatccacacctaaaatttctattccgggggttttccacaaatcttccagggcttccacaagctgtcccagcctggtctgtccctggctccagtttaccgtaagttcttcacaggtaagcacatccttgtcaatggaaacatacaagggcagctccccctggatctgtcccagggcagctctccatccctcccgggcggcaagcgcctccctggaaaaggctgtgagcttttccttaacaggccctgacacctgctgcagatcctccctgccaggtccggccagccaaatcttcttcagcaggggaagtgttctggccgcattctccccccagcctccacaggacagcagatctccaaaggccggaggctgcatatccgtgtgattgtcaatgaccagcagggcaaatggcctgtccacccgttccagccacagacgggtgatataatgatagttcccggaatccagaaaatgaattccactaaggggaagcttctttatgatctcttccagatgcttcttggcctcctggtcacaataacagttggtgccgggcatctgccggcagtttatccataccgggttatagtccttccagaactcctgtctctcataaactcctgtaaaatcaaacaagatcatgggtctgtccaattatgccacgttcctctccttggttcccatcccccgcttatgcatctttggcatgaaagcggagaacttccacaaatgaatatagggcgctgcataaagcagcaccctaatggtatcatggaaaatccagaagttcaatctttttattttacctgatgttttgcaaatcccttccggcacagcacaaaggccgctgcagccaccactgcgaattccaccaggtagatccactgatatgcaacccctgttccaaatagatggaacgaagggatacacagcatctcctgcatggtggcaaatatggggaaaagtcccaggattttctggggcaggcccatcattataatacaaatggggccgaaataaaatacaaatccgcagatcaggctcacaaaggaggactgggtatacacagagatgatcagcaccgcccctgtggtgaccagcattgccaagatccagatcaccatctcccagagcaccgcaccgccgcaggtgaggttataaggcacatccaatatcagctgcgcactggtatggatgccctccagcccaaaattcataagcagcggtatcagatggacaagaaaaaccagggcacagcagcccgctgtaaacagaaacgctgcaatgatcttggccttgatgcacttgtttttcccatacctggaggtgaggaccagggcatccataccgctcccgtactcatcggaaaatattcctgccacggcaatgacgatcagtgccccaaataacatcataaaagtagacagggaatcaaagaatgtctcccagctatagaaaaagcccgcattcacctgaatgccccggtccgtataggcttccttcacagtcatgccataatattttgaatactcatcctgaaaggtcgtgtacgcccagttccacagaggctccccgtatacataggcatactcttctgctgagctgttggacatgggctcttccttctccaggatctcctgaaccttctcatctgtgagaggaccttcatagcgcctgcctgtctccattatatattcatttgccgccctgccgttaagctctctgccgtccgctgtggatatccggccgaaaaaataattgctggccagaactgcagcaagggccatcatgagcacaagagggatccacacatatttcttacgcaggatcttctcaaattcaaaccgtatcaactctcccattgtgttactcctccccctctgagctttcgtcaaaatagtataaatacaggtcttccagattgggtgtcaccaaaacggcgccctctcccggacatttctccgaaataatgcgaaggatcgtgcttccgccctcatttctcatattgcccacattgaacctggcagcaagggcatccgcctcacaggaaggaacctccagctcccacacaaagccttccacctccttagtgatctcctccggagagccttgatgaatcagccgtccgtccttcatgaccaggatctccccagcgatatactccacatcagacacaatgtgggtggatagaagaacgatcttatcctttgagatggaactgatgagattccggaaccgtacccgctccttggggtccaggcctgcggtaggttcatccagcaccaggatctggggattgttcagcatggcctgggcaattcccagcctctgcttcatgccgccggagaaggttttgatcttcttattttttacctgatccaggcttaacagctccagaagctcctgtgccctttccctggccagattcttgggaatccccttaagcgctgccatatacagcaggaaacgcatggctgtaaattccggataatagccgaaatgctggggaagataacccaaaagatctctgtactcctctcccatctcccggatattatagttatctaagatcacctcaccacttgtggggacctgaatgtcgcagatcaggcgcatcaatgtggtcttacctgccccatttgcccccagaagtccgtagacgcctctggtgaggcttacggacacctgatccacagccagctttgttccatattgtttggtgagacggtctaatcgcagttccatgaaagtaattcctccttttttgtacttttgagcatttttccaagacttcctataagaagtgccaggctcaaaagcagtgctgtataaatacccatactgttttcctgaatgaagtttcttgcgtgaaagccaatgttctgatagcttccggccaggacaactcccagaaccacagacaaggctgtgagtagatagccggaaatcctccggggtgttcttctgatcacgttcatatagaaagcgtttgacagattaaaggggatcaagatggtgactatggacaggttcaaggaattggaatagcttgcggtcacagccgtaaggactgtgagcaccagcaggtcccctgcccccataagctccagcttcatcatctgtatcattcttaaatcatacctgcaggcctgctccagctcccacatgccgcaggaatatccccggatcagttccagggtactgatccctcccaatactggtgccaagaccatggcggatgtaaggatcatctgggtgtcctgctttcctcctgccaatagcagccagccaaagtagatcaggataagcccctgtgccagccacacaaagggcgacacatacgtgcctacccggagcatctggcgggtccagggaattttcacaaaggctctgcgcccctttaatttcccgctgatctcctcaatggtctgtttctttctgtcctggtttatctccggcatttttgcctgttttaccagctttataagttcccggtctgtcatgagcccaatccctccttttccaaaattgcttttaatttctctaatccccgccgcagcctggattttgccgtgggcaggggaacaccggttatacgggcaatgtccagaagccggaagtcataataatacttcaagatcactgcctccctctgctcctggataagctgcagcagcgccttgtgtacgatctgggcagtctctgctgcctccatctggtttccctgctgggggatgttctccagctcctcctctcccgcatagtccggcctttttcctctgaaatagtcattgcacacatttcttgcaatgcagaacagatatcctttaaacttcttctgctcccggtaggtataaatggaatgagtaagccgcagaaaggtttcctgggtgcagtcgcaggctgtctcggaatctcctaccttgtaatagcagaaatagtaaatctggtcataatatcgctccatgagtttctccagcatatcccgctgtccctgttggatgcgctggatgagttcctggtctgtaagctccttggcctgcactttttcacctccccgggctgttttttctatgtgtaaaacgtcctacactaatagaaacgccatatccttctaaaaagatgctgcctctttctattttttcgaaaaaaaagaggatacggttttccatatcctctaactgtgtctgtctcctcattctcccagtccgtaggcaagggcgatctccctctccacatccttcaggcattccataagcaggggattaaacacgccgcactccccgcccaggatcatactcacagccttctcatgactgtaggccttcttatacacacgctcactgaccagggcatcgtacacatctgccagggccactacctgtgaccagatggtgatctcctccccccgaagcttgtccgggtaaccgcctccgtcccaccgctcatggtgatgcctgcagatgtcgtaggcatattcatacagaggattctcccgaagatggggcacactgtccagcagctcacagccccggacggtatgggtcttcatgatctcaaattcttctgtggtcagtctgccgggcttattgagaatgttgtccggaatggcgatcttccccacatcgtgcatgacggccgcatctgcgatgagctgaatctgctcgtcgtccagctccacctggggataccgtctctttatggcatttaaaaggtgcagcgtgagcttactcatgcgcacaacatgttctccggattcacagtcccggaactcaatggctgtggacaaggtctcaataacagaacggttcagctcccggatctcccgggcctgctccttcaaaaggacatcctgttcatttaccaggttgttcagcttgatcacattgccgattctccggcgtataaaaaacggggtgatgggttttccgataatatccacaacgcccaggtcataacctttcttcagaagagtctgggaagtctccgcggtaatgagaaataccggcatcttcccagtcagcttttcttccttcatgcactccagaacctggaagccatccatcacaggcattaccacatccagcaggactgcggcgatcttcccctgatgggaacggataagatctaaggcctccttgccatttactgcttccaatatgtgatattcttcctggaaggtagcagctaaaatggcgcggtttatctctatatcatccacgatcagaatggtttctttcccttccacaccactgcctcctccctgacgcttttataaaaatctcctcatcctttgcttctctcacacgcgctcctttgggtccttatctcttttcccctatgaaaaacagtgccacagttcccggaccggaatgggctccgatcgtcgctcccacaggattgatgatcaccttctcgatgggatagcgttcttttaccttgtcagccacatactgggcatcctccagacaatctccgtgactgataaaaatggtgttgcaggtatccttgtattttccaatccgttcgtccatcatatccaccagagcgtggagggatttcttcctgcctctggctttaccctgggggatcagccgcccctggtcatccacatggagcacgggcttaatattcagcatactgcccaccacagccgttgtgcgggacactcttccgccccggaacaggtgaaacagatcatctacggtaaacacatggaccatatttaatttatgctcctccacccactgggctgtctcatctatggatctgccctgctccttctgctccacggccttatacaccaaaagcccctggcccagagaagcacataaggaatccacaataaggatcttcctctccggatacagctccctcagttcatctgcagccaccagacagctgttatagctcccgcttaacccagaggaaaaagcaatgtgcagaatatccttcccctgttccagataaggcttcatcatgtctatggcagtttccggatttacctgagcagtagtgggcatggaccccttcctcattttatcgtaaaattcgtgtacgggcatgaaattgtcatggctgtaattgacaccgtcaatgctgtagctaagaaagctgcagcccactccatgctcattcatatactcctctggcagatcactgttgttatcggttgttatcacaaagtctctcatctatatcctcctcctgcatgcagatgcactctacggaatttttaaaatactctttttctatcataccatttctggattttccccgcaatctttttttcccgtgcctgaaaaaaaagcctgaaaatccggttttcaaaattcccccaggaggatgggcagcctttacaaatttcctgctgaccccgtagactacagctctttcaccaccttaacagctgtttccagctgcagatccacatccggcttctcttcttggttctccacctccacatccggcttgatccccacctggtggatgttatttcccgccggggtatagtacttggatatagtgagcttcactgcacttccgtctgtgagctccttcactgtctgaacaattccttttccataggtggtggtgcccacaatcttgcccacgccatagtccttcacagctcctgcgaagatttctgaggcgctggcgctgttctcatttacaagaaccacaaggggcatctccaggggatgctctccatcacagtacttcacatcctggttcccatacttatcctcggtgtatacgatccgcccctcagggaggatctgctccagaatatcacacacagagcttaacagtcctcccggattgtccctgagatccacgatcaaccgctccatgccctggtccttcagatcctcaatagcactttcatactgcttgaaggtaactcctttgaattcgttgatggacagatagcccacatggtccttcagcatctggctgcttacggtgtggagctccacgtctgtgacagacaccttgatctccaagggctcttcctgtgcctccctggtgatggtcagtaccacatcctgcctggccgcctcctggatcagatcagatatttctcccagctgcagttctgtgatgtctgtgtcattgaccctggtgataatatctcccaccttcacccctgcctggtcacagggacctccttcatagcattccaccacctccacgcctccctgggctgccttctgcatcaaaataccgatgcccagatactctccctgggtgctgtcactgacagtcttgtactcctgggccgtgtagtacctggagtacgggtcgtccagaccgtacagcagtcctgtatagattccctccgccagcttctcctcatccttatcctccagataatactggtcgatcaaggcctccagatatttcagcttctgcacatggaccgggtccgtgagcacattggccgtggaggaaaagggatttccatagatggtcacataggcgcccacacacagaaggaatgctcccgctgctcccagcacgatcccctgtaccagcttccttctgcctctcttcctgtcctgttgttcatccatattccaattggtcatgtatcctccgctccttgtagcaaaaaggctgttgatcctttccaacagcctttcttctttctactattctaataacaaattttctgtgttatacccgcaaatgctttctggtggtaatgatacttccgatcagaccgatccccattcccagaagaaggcccacaggaagcagcaccagatagatccgctccacgggtataaagttcataaagcttgtgagaacattaaatttctcaaatacaagggacactgccgtattgtataaaaagtacagagccgtgagaggtatggccgcgccgatcagtcccagcacaataccctccagcaaaaagggcgcccttacgaaagcatctgtggctccgataaatttcatgatcccgatttcttcctttctcactgcaatacccacggaaaccgtgttactgatcaggaaaatagagatcagaagaagcaccacgataatactgatggatatgtaggataccagccggttaaaggtccccagggtctccgccgcagttgcagactgattcacctcccggatcccctccagactgttaatgtagtccaccagggccgcctgcttctcaatctcatttacatatacatgcagattggctgaatttgccagaggattgtcatccttaaagccctccgctgcctcagaatctccgaaatactgctggctccattcttcccaggcctggtccgcagatacatattccacatggtttacctccggcctggtttcgatctgctccttgatcttcaggatctgctcttccccggtgccttccacaaacagtaccgtcaccggaatctctgtctccaccttctgggtaatggcgtcaatgttattcactatggaataaaaaataccaaacaggaaaatacaggcagccatagtgatcacagatgccagggaaaacatccagtttctcttaatatttttaaagccctgtttcagtgtataccaaaatgtactaggcctcatggtaaacaccttctttctcatcgctgacgatcacgccgtttttcatggtgactacccttttcttcatagtgtttacgatttccttgttgtgggtgaccaccagcaccgtggttcccttctcattgatctgctccaaaaggtgcatgatctcctcagaggtatgggggtccagatttcctgtgggctcgtcagccaggagaatatccggcttattgatcagggccctggccagggcaaccctctgctgctctccacctgagagctcatcgggaaaagatttatattttgcaggaagtcccacctcctggaggatctccggcacacgcttgcggatcacccgggttgggcgtccgatgaccctctgggcaaaggccacgttctcatacacatttctgtccttgagaagacggaaatcctgaaaaactactcccagctttcttctatattttgccaccctgcggtgcttcatcccctccagacgctccccgctgacggtgatcgtaccggacgtagaatccagctccttcaaaagcagcttaatcaatgtagacttaccggatccgctgctgcccactacaaatacaaactcgcccttgtccacatggaggttggcgtggcttaatgccggctgcccctttccataggacttggtaacgtccactaaatcaatcataatatcctcctcaaaacagctcctggaatcttccgggagcctaaaagtatttaacctttaactttttcgtaacattattgtaacatatatctctgagaatgcaactctttttttgcaaaaacacagaaatttcaaatttattaggaaatctggaattgaaattcccctccatactttaacttacctggtccaaaattgcaatagttaaaaaaagtctaccgcctgtaaaagcggtagacaaaatgtaggcgaaccaatcaatctcatgtaccaaagtgctgcaaatacaacatcagtattccagcgtctccatatatttcatataccggaccaccataagggcgatcttaaaggtaatggcatcctcgaatacacgcagatccagccccgtgctcttctggagcttatccagacggtacaccagggtatttctgtgaatgtacagctgcctggaggtctcggatacattcaggctgttctcaaagaatttatcaatggtgatcagggtctcctcatcaaaatcatccggggacttgccgtcaaagatctccttgatgaacatcttacacagaggaatgggcagctgatagatcagacggccgatccccagagagctgtatgcaatgacttccttctctccaaagaaaatcttccccacatccagagccatcctggcctccttgtaggaacgggacacttcctttaactcatggacaatggtaccgtaggcaatgtgagttcccgcctccctgccgaaatccagggtatccagaatcgtctccgcaagcttgtccatttcctcatagccttcattctcacccagagtcttcacaatgataatgcttcgttcatccactgcagtgataaaatccttggacttgcccccgaaaaggctcttcacgctctctatggaattgtaatccttctcctgctgggtctccaggatcatgaccacacgcctcacgtctgcctcaatgtgcagcttcttggcccggttgtaaatatccaccagaagcaagttatccagcaaaagatttttaataaagctgtctttatcaaaacgctctttgtaggccacgatcagattctgaatctgaaaagcggccagctttcccaccatatatgtatcttcgtcttctccgtgaactgcgagaatatactccagctgataatcgtcacatactttaaaatactgacagcccttcaccaactggctctctgcctgagaatccgcaaatgcctgcacatctgcctggctgatattcatatcggaagtggaagccagaacctttccttcggtatcaatcacgcaaaactcgtttctggaaatttctttaagaccttcaagtgtattttgtagtacctgatttgatatcatctgttctcaatcccttctcgctttttatagtatttgctacatattattctttattttaatacaaattcaccaaaaatgaaaggggtaaactgtaaaaagttataaaaaagacggaggcccctttggggggcatccgcctcatgatacttttgtgatggattctcaggccttccccttctctttgggaactatgacaaatccataattttccagagtggcaaaatactggactaatcttggatacaaaggctctgccttttcaccaaagtgttccttcaccttttctccaatggcagctacggtaacacagccgtcaatgagcggccacacaaagcttccgaactcgtccagatgcacataggaaaccttgggcttatggaacagcttctgggcaattttgttaaagacccctttattttccaattccagaaccacaatctgattttcttcaaaatgaaatcccaacgccgggtttctcctgggtataagatccaggtaatttacatccggctgtttttgtttcttttttctcatttacgcttttttcttcttccataaggagaatttcagcagtgacaggatcataacgatcatgagaaccacaccgccgatgttgccaaggttcagatacttggaagcattcaggtccagacctaccacagcgaagatggccagcaaaataccaaccagaccttcaccggcgatcatacccgcgcagtacaaggtaccgtctgtggactgtttgtttttggttttctcatccactttctttctgccatccatgaacatacgaaccacgccgccgatcataatggttgcgttcagataaatgggaaggtacagaccaatagcaaagggcataaccggaattctcaaaatttccaggcctagtgcaaggaacacacccacaaacaccagtgtccatggaagcttgccgcccatgataccttcaacgatcatcttcataagagttgcctgaggagccggaacctctgctccgccgtagccccatgcagcgttcagcagataaagcacaccgccgatggcaaggcctgaggccacaacgccgatcagctctccgatctgctgtttcttaggtgtagcgcctaataagtaaccagttttcaagtcctgggaagtatcacctgcaatggcagctacgatacagattacagaaccaatggcaatggcgccggtcataccggtaattccagtatctccggaagctttgatcacgaaggtggcgatcagcagggtagcgatggccataccagataccgggttgttggagcttccaatgagacctaccatacgggaggacacggttgcaaagaagaaaccgaaaataacaatgataatagctccgataatattaaccgggatagcaggtacaagccagatgatcaggatcatagccacaatgccgatgaggatcagattcatgggaagatcttgagcggttcttgcagtacttgtattcttacttcccttcatggatttcatggaatcccggaaggtgctgatgatcagcggcagtgatttgatcagggaaataataccgccggtggcgatggcgcctgcacctatgtatttcacgtaggtggtccaaatggcagaagctccgcctgctgcataaaggttggagatggtgtcggttcccggatacatgatggtgtctggtccaaacaggcagatcagaggaatgatcaccagccagcccactacagaacccacaaacataaaggatgcgatccttggtcctacaatatatccaacacccagaagagcgggatatacttccataccgatctcacctttaaaggatttgaaggcagcagccacatcggcaggaatgatctttacaccgtctaccaggaatttgaaaatagcagccagtcccataccggagaatacggtacctgcgttggctccgccttcttctccagccagaagtacttccgcacaggcagttccttctggatacagcagatttgcatgctcttttacaatcagtgcattacgaaggggtaccatgaaaagtacacctaaaacaccgccgcaaagggcgatcagggtgatttccaccaggcttggattatcacttaatccttcttttgcccagaggaacaatgccggcatggtaaagatggcaccggcagccagggattcaccggcggaaccgatggtctgaaccatgttgctctccaaaatggagtttttcttcatgatgacgcgaatcacgcccatggagattaccgctgcaggaatggaggcagacacggtcatacctacacgaagtcccaggtatgcattggccgcaccaaagacaactgccaggataatacccatgatgatggatgtcaccgtaaactccggagtgatcttttccgccggaatatacggtttgaactctttgttctcgttcatgatttggtttcctttcctcttttctctttatttgtttaaatacataaactcatattattctaccaaatatcctttgaagtttcaagtttttggtcataattatttaatacattttttataaatcttggaaaaattttattattttgtcactttaaacatccgcttccagctgttttgtcaaatatcggcctacaattttagagaaattaaagatatcatgaatgtaagcaaaatccttcccaaaaatcttcttctctgttgccaggtccttctcctcccctgcaaacactcctaaaacgctcacccccagattccgcagccggcgtacctccatggcagtgtccgcaatggcatattttccctggtatggctgtggatttctggcattgggccggttgacgatcacgtcatagggcctgccgtcacttagaacaatgaggatcttcttctcctcatccctggacaaaagcccatgacctgcagccttgatggcaaggccgtcccggttgttggaggaggtcacataattaaagatattttcattggcgctgcgctcatcatcgtaattccggaaccggtgcatgaccgtataatcccagaaggtacaaaaactcatgaccctgtgggcaatgcccacattactcaaagcttcgctgatcatatacccctgaagagccacctggccctggcggctcatctgggagccgctggcatcaatgagcacatccaccacaaaatccgaggcgtccccacgcagctcccgtttgaagattttggcatccgtgcttcgtcccactctccacagccggctgggcacaatggtcccccagtctgacaacacctcctggacctcacttcgcagaaccagagactttcttagaagctccgtgagatttgtgatgttccgctttgcaatcctatgcttgtcatgataatggaacagatttttgctgcgcagccgtttggcatattcatactggtagttcttttttacgggatttttcaggatcccttctgtaaaatacagactgcagtccccgtgaatctccctgcacagcagatgattcagccttttctcctcggtttctgtgagataggtttttccatagttcagctccacataggtgtgggccttctccagaacctctgggggcagtaccgtgatcttgtgcttgatcaggcggtcctcctccatctcctctgtcacctgctcatcctccaggctggacatacgctcagtgatcttgtccacatagttttccagagcctcctcgtacatctcctcagacagaaaatcctcccagttgtactccgtcagctcctccagggtaacagccagaacacggtccaggcccccgtggaacttctcaaactccgggtccaccacagtattgtacagcttgtcaatgatctggatcagctccatggtatccccggcccggcggcactcataaacctggcttctccaccgctccatccgggcctccacctcgtggccgccttcctgaagatgatcccttaaaacagccagcctgagcctgcctaaaatatccttaaaagagggcagctcctcaaattcctgatccaggatatcctccatggcctgacggcgcatggaggatacaccggggcgctcctcacagatcttatcccccacagcctcctcaatacacagctgggccagggtagtcagctccccctcccctgcctggagaaagattttcttcaccagatacaggcccatcagctccttgtcatagtatttggcaaaagctccctgcttgatgccgtcatacagagcaatggacttggaacgcagaaacagggacacatcaggttttacctccaaagaataatccccgctcacggtccacagcagattgcggatcctgttttccagctcaaattgcgaatcctctaaaaattcctgtatctcttccattttatatccacctgccttccccgctctcaggcatatacatcctcccgggtccactccttcggtatccgggtgctcaccacatcctccacgatctccttttcaaacacgtcgaaggttttgtttaccacacccatacacactgcctgccagggggaaagacctgcctccaccaccttcatggctgccagcagccctcttaggtccagcgctttggtggagatctcgctgttcagggatttcttctggagatccaggaaaatgcccataaactgctccaccgccttttccttggcatgggggaacatctcatcaaaaataaagcgcaggctctcctttgtctggggcggcatgtcaatgaccaggaaccgggagaccaaagcctcattcagctccttcgtgcctgcataaccgtagttcatagtgccaataaaccgtgctgcaggatgaagctggatcttgtcatacccaggcacatcgatggagcggcggtagtccagggtggcgtggagcacagagacggcatcgttcttggccatattgatctcatccagaatgccaaagcctccgtactgggcacattgatagatgcttccctttctcagctccacctggttgttccggaaggtgtctgtgccgatgagatcgccgctgttggtgttcacatggaaagacacattataggagggcctgccgaaaatgtatgccaggttctctgccagcacgttcttcccagtggccttggggcctgtgagcagcaggttttccccctggagaagaccggcaatggccatttccaggatctctctcccatagaagggcatggatggttttgccacccggtaggtgacctcctgggatacggtgtaggtttctctgaatttttccacctcaccgatcaaacgctgtgacacttcctgtttttccaaaaatttcagttcttccatcataccttttctcctttgcgcagttgttgcgcctcctaattcatactattatagtccattttattttaaaattccagttccactttctgcctggacagttatccccctgaccagcagtacaaaaagagaacactgaaaaagccctgcgtcaacgcagcgttcctcagcgttctctcctgtctcttgcgccggttatacctcgaagatcaaatctccataagaaggcatgggccacatttctttgtccacgatcatttccagcttatctaccggtgttctcagctcctccattgcaggaaaaatcttctctcggtaaaagacagcccgctctcttccctccggttgcttcatggcctgttctgccagcttttccaaatggctcatggccgtgtaggtgcttttcaaaagcttggtacactgcttcagaatgtcattctgtacgctcacgtcaaaggcccccgccgtgcgcactgcattgatggactctgccaccatattgatatatttgatcactgcagggatgatctgcttgctggcaatgtcgatcatagttctggcttctatattaatggccttggcatagacctcatacttgatctctgctctggactccagctctgttttcgtaaacacgccaaagttctcgaagagcttcacggacttctccgaggtgagacaggggatggcatccaccatggagggaaggatgggaagtccccgtcttcttgcctccttctcccactctggagcatagccgtttccattaaacacgatgcgctgatgggcgttggcatattccttgatgagatcatggactgccatatcaaaatccgccgccgtctccagacggtcacaggcttccttaaatgcctctgcagtgatggtattaagtaccacgttgcaggaggaaatggaatctctggagcctaccatacggaattcaaatttatttcctgtaaaggcaaagggggaggtacggtttctgtccgtggcatccttcatgaaatctggaagggtcttcacacctgtggacagcttctctcccttgatgctgctggtagcagtccctgtgctgatgagctgctccagcacatcctccagctgctctcccaagaatacggagatcactgccgggggggcctcatggccgcccagacgatggtcatttcccacatctgcggcagattctcgaagaaggtctgcatgctggtccacagccttcaaaatacaggtgagcaccagaaggaactgaatgttctcatggggtgtttttcccggatccagaaggttgatcccatcgtctgtggtgagggaccagttgttgtgctttccagagccgttgatcccccggaagggcttctcatggagaagacagcgcattccatgacggctggcaacctttttcaaaaggcgcatcatcatctgattgtgatccgcagccacattcacaggctcatagatgggcgccagctcatgctgggcaggagctgcttcgttgtgctgggtcttggctgtgatcccaagcttccagcattcctcattaacctctttcatatatgcagatacacgctggcggatggttcccaggtagtggtcatccatctcctgtcctttgggaggcattgccccgaaaagggtccggccggtgtaggtcaggtcctttctttgaagccatttctccttatcaataagaaagtattcctgctctgcgcctacagaaggcgtcaccttcttggaggtgttgttcccaaacagacggatcagccgcagagcctgggtattcactgcctccatggagcgcagcagaggtgtcttctgatccagggcctccccggtataagaacaaaaggcagtggggatacacagggtcccgcctgcggcgtcatgtcttacaaatgcaggagaggtacaatcccaggtggtatagcccctggcctcaaaggtggcccgcagaccgccggaggggaaggaggaagcgtccggctctcccttgatcagctccttgccggaaaagctcagaagcacctttccgttgtccatgggtgcggtgataaatgcatcatgcttttccgcagtgactccggtgaggggctggaaccagtggctgtaatgggtggcacccttttcaatggcccactccttcatctcgtgggccaccacatctgccacctcaagagacaattccttaccctcttccgtagtcttcttcagttccttgtaaaccttctttggaagccgcgcctgcatgacggaatcattaaacacatcacatccaaaaatttctgcaacatttataaaatcgcccattcttgttctcctctttcttgggtattgttacggtttctaccaacactgttctgtacacaccagggaaattttccttcggtctgatctgtccctgcatcccggcggatcatacctgtttattgctggtaagataaagattcagggccttgtgccggttctcaatctccacctgctcatggctgcccccgtattctccgtccagggtccagggaacttcctccctggaggtgatggtaagctttttggttttaaaagaatagattagattggtcttatcctccgcggtgagaagggatgccaggatttcctggagctctaagggattccttggacatgtgatcagcgtcacctcaaaaaggccgtcgttcatgtccacattttttcctgtcaggtgcttaaaaccgcctacagaacgggaattggtgaccatgccatatataaaatcatcctcaatgacctggtcttcggtctccaccttaagataataagacttgatctcaaaaagacgcttcattccctccagcacataggccacatgccccagaatatttttcagatcctggtctgtctggtaggctacatcggtaaacaggccaaaggccgcaatataggcaaaggtcttatcattaaattttccaatatcacagtggtacagttccccctccagcaccatctctgctgcctgcatgatatttttgggaaaaaacaggctgttggcaaagtcattggtgcttcccgcaggaatataaccgatgggcaccttgctgtccatctcggagattcctgtaaccacctcatccagggttccgtccccgccgctgcacacgatcacatccaccctgtcacagtattcccttgcctggcagtaagcatcctgtggcccctgggtaggatgaaggatcacttcataaccacctttaacaaacaggtccacaatctctagaagttttgtttttatttttcccttacctgccttggggttaaacacaaacagcattttttttgccaaattcattcctcccacttctgttttctcctgggcacacccactgcttccagggtgcctgtcacagctgcctcttccctgatcccctccatactccgggacaggaaagatgcccgaaagggttttgattcttctgtattttactacgtcccattcaaacacgcaagtaaaaaagacaccggcccaggagacgtaaaaaaatcccacagaaaaatctgcaggattttaagtagcgagagggggacttgaaccctcgacaccacgggtatgaaccgtgtgctctagccagctgagctatctcgccatattctattgaaggttatggggcctatagggctcgaacctatgaccctctgcttgtaaggcagatgctctcccagctgagctaagaccccatatagtagcgagagggggacttgaaccctcgacaccacgggtatgaaccgtgtgctctagccagctgagctatctcgccatatttcttgaaaattatggggcctatagggctcgaacctatgaccctctgcttgtaaggcagatgctctcccagctgagctaagaccccatatgcaagcgggtttcgtattcatccgcaacccgctttgctattatataactatacactatcgtttgtcaaccacttttttgtcatttttttgccaactgcaccttccaatttcaattggcagaaattccccaaggcggctgcctgcctgtgcacagttacctgctgattttttcctttatcacttaaaatactccacgccggactcaaagatcttcatgtcctgctctccgtagatgttcactgcaacaccctgatcccggcgctcggaatgtgccattttacccagcacgcgtccgtccggactggtgatcccctcaatggcgctgtaggaaccgttcacattccattcttcgtcatttacaaggaggcgtccgtctgcatccacatactgagtggccacctggccgttttcaaagagcttggcgatccactgggcatttgccacaaagcgtccctctccatgggaggcgggattacagtataccccacctaactgcgcctgtctcagccatggggacttgttgctcaccaccttggtgtacaccatcttggaaatatgacgtccaatggtgttataggtcagtgtgggcgcagcctgatcctgtccggtaatttctccgttgggcacaagccccagcttgatcagggcctggaaaccgttgcagataccaagtgccagaccgtccctctcattgagaagcttcatcactgcctctttgatcttggcattttggaaagccgttgcaaagaatttggcagagccgtctggctcgtctcctgcggaaaatccgccggggaacatgatcatctgtgcctgagcgatggatttttcaaaaagctccacggaatcatggatatcctgggcagtcaggttcttaaacaccttcacgtccacctgggcgcctgcacgctcaaaggctctggtgctgtcatattcacagttggtgcccgggaacactgggataaacactgtgggcttggccaccttgtgtctgcacacaaagatctccttggcctcataaagcttctcttcttttacattttcctggtcctctgcaccggaacgtgttttaaacacactctccagggtgctgctccaggccttctccccatcacccaggtcaatttccatatcccgataggtaatggtgccgtcattggtaacttcaccgatcacggtgtaggtgatggccagctcacccactttgccatcaggcacttcgcagataatatccccaaagccaggaacaaacaggtctctttcatccacactgtggtcaatgaccacacccatatggtttccaaaggccatcttgctcactgccgccgcaatcccgtgacggtccagggcataggcggagatcactcgtccggcctttatatcctcatggagcttaccgtactggtccataagttgcggataatccggcaggtcatactgggccttgggggctctgagccataccagcttgcttcctgccttcttcagctccggagtgatcacatcctgaagctttgccacatccacggcgaaggacaccaaagtcgggggcacgtctatatcgttaaaggttccggacatactgtccttaccgccaatggagggaagtccaaagcccatctgggctgcataggcgcccagcagagcggcaaagggctggctccatctggagggatcctctgtcattcttctgaaatactcctggaaggtaaagcggatcttggaataatcccctcctgctgccacgatcctggccacagattccaccactgcatatacagcgccgtggtaaggactccagctggacagatagggatcaaagccataggacatcatggtgacggtgttggtatttccctttgaaacaggaacctttgccaccatggtctgggtctccgtcatctgatattttccaccgtagggcataaacacagaggcagcgccgatggaaccatcgaacatttccaccaggcccttctgggagcatacatttaaatctttcagggtattcagccatttttccttcacattgccgatctctggacgttctgtcaggatgtttccttcttttgagggaatgtccaccttcacttctgtctcctgatgggcgccgttggtatccaggaaggctctggaaatatttacgatctcttttcctctccacaccagaaccaggcggggttcctctgtgactacagccacctgcacggcctccagattttcctcattggcatatttcaggaaggtgtccacatcttttgggtccaccaccactgccatacgctcctgggattctgagatagcgatctccgttccgtccaggcctgcatatttttttggaaccttgtccaggtccacccgaagtcccggtgccagctctccgatggccacggacacgccgcctgcgccaaaatcattacatttcttgataatagcactgacctcttctcttcggaacatgcgctggatctttctctctgtgggggcatttcccttctgcacctcagcgccgcacacttcaatggaagcctctgtgtgcaccttggaggagccggttgcaccgccgataccgtcacggcctgtgcggcctcctaaaaggataatgatatctcccgggtcagagttctcacggatcaccgcacgtctgggagctgcccccagaacggcaccgatctccatacgctttgccacatagttggggtgatagatttcttttacatagccagttgccagaccgatctggttgccgtaggagctgtagccggaggcagcgcctctcaccagcttcttctggggcagcttgcccttaagggtttccttcacagagaccgtagggtctgcggctcctgtcacacgcatggcctggtatacataagttctcccggagaggggatcacggatggcacccccaaggcaggtggcggcaccaccgaagggttcgatctctgtgggatggttgtgggtttcatttttaaagttgatgagccactcttcctctttgccgtccacatccaccggcaccacgatggagcaggcgttaatctcatccgactcttcctgatctgcaagctttccttctgccttcagctttttcatagctgccagggccaggtccataaggcacacgaatttatcgtctctgcctttatagagcacctcccggtcggccagatactgcttgtatgtattttcaatgggctcccggtagtcaccctccccgaactccacgttcgtaagctctgtggagaaggtggtatggcggcagtgatcggaccagtaggtgtccagaacacggatctctgtcacagaggggtcccgtttttcttctgctttaaaataattttgaatatgctggaaatccttgaaggtcatagccaggttcaaggatgcatagagggtttctaattcatctttgggcatttcacaaaagccttcaaaggaagccacatcttccggctccgggaaattcaccaccagggtctggggcttgtccatgcctgtctctctggaatccacagggttgatacagtggttcttaatggcctggaactcttcctctgtgacagagccttcaatcacataggtggttgcagagcggattatgggctgggcatcctccttcaggaactggatacactgtacagcagagtctgctctctggtcaaactgtcccggcagatactccacggaaaaaatcctggaattttctcctgggtcaaaggtttccagatacagatcatccaccggcggctctgcaaataccgttttgcaggccttctcaaatacctcctgggaaatattctccacatcgtagcggataagcacccgcactccggtcacattctggatatccaggtaatgccggatctcatggcgaagctcctttgccttaaccgcaaagcctggtttcttttccacataaactcgtcttacgtcactcatagacctgttcctttctctgtccggctccaaggcttcccgttcaatggggaaacagcagcgtctttgccgggtattcatttataggaaacttcctattgctctcattacgctctcatggtatcatactttatatcattagtaaaattaatatgtctaatatcatttattatatgtactaatatattaggcggagtttttccacccctcttccctgcctgcccataacctgtcaaaaaggagacttccatggatataaatctggagttataccgtgtattttattatgtagccaccaccctgagcttttccgaggcctccaggcggctgtacatttcccagtctgccgtgagccagtccattaagactttggaaaaaaagctgaaccaccccctctttgtgcgcagtaccaagaaagtccagcttactcctgagggggagacccttctccttcacgtggagcccgccatccgtatgatcgcctctggagaaaaccttctcacagaacacaattccctggccggtcagctgcgcatcggagccagcgacaccatctgccggtatttcctggtggattatctgaagcggttccacacggattatccggacgtacacatccgggtcaccaaccgcacctccatcggctgtgtggagctgctggaaagcggacaggtggatttcattgtatgcaattatcccaactcccggctgggcttatcctccggctgccgttttctcaaggagttccgggacgtatttgtggccaacgcccagtatttccccctggaaaaacagcccctcaccctggaggagctgaaaaactatcctattttaatgctcactcagaaaagcaccaccagcgaatacctacaccagcttttctcagccagagggctggagcttcatcccgaggtggagctcagcagcaatgacctgctcattgatctggcccggatcgggctgggtattgcctttgtgccagactatatgctggagggccagaaggatctgttccgtctcaccttaaaagaggagcttcctccccggcacatagctcttgtaagacaggacatcctgccagtgcttcccgcagcggaaaaatttatggaatacttttaatttgaattgaatgttggaattgaatgttggatctcaattgcaaagaaggctgcaggccaatgttgttcctgaaagggaaaatgctttttcagacattttcctctaaaaggaatctcatgggcgatgcagccttctttatggaatatgtgataattggcttgttttcacctggtatctttcaaccgggtctgtttcttaaacctcagcaataacctctacttcgcagagaacattctttggcagagtcttcacagccacacaagaacgtgcaggcttgttcacaaaatattttgcataaatttcattaaatgcagcgaaatcccccatatctgccaggaagcaggtggtcttcacagccttctcaaagctggttccggcctctgccaaaacagctcccaaattcttcattacctgctcagcctgagcctcaatggtatctcctgcgatctctcctgttgccggatctacaggaatctgtccagaagtaaataatactccgttcatgatcatagcctgtgaatatggtccgatggcagccggtgccttgtctgtatatacaaccttcatttcacaatctcccttcctattacgtacattttataaatcactgttttagtttcttttattgtattacaaaaatttgttagggtcaagaaatatttttgtttttcgtgtttacaaaaacaaaaatactcttgaacaccccatttaaaaaatgtattctaaaacaagattctccctgaagccgccttatccccaaaaagcgtccgcctccaggacgatctgccctgcttttcatcagataaaaacatagaaaaggagacatactcatgaaagatactccattaaccttccgctatgcacaggaaaaagatatccccttaatcctagaattcatccgtgctcttgcagactacgaaaaaatgctggaccaggtcactgccaccccggaactgctgaagcagtggctgtttgaccagcccaaagcagaagtcctcttcgccgtagcagatggccaagagatcggctttgccctgttcttccacaatttttccaccttccttggaaaagccggactctatctggaagacttatacgtgcggccagccttccggggaaaaggctgcggaaaagctctcctgggccagcttgccaaaatcgcagtggagcggggctgcggccgcctggaatggtggtgcctggactggaaccgtcccagcatcgacttctatctctccctgggcgcccaacctatgaaagactggacggtataccggattgccggggacactctggcggcccttgcccaagaagaaattcttccctcatgaagccgcatccaggatttccccctggatcaaatcccataagtgacataaaacggcgggagccccataggtttcccgccgtaaacgcattttcaatatctattccactgtcacagattttgccagattccttggcttatccacatccagtcctcttccaagagacacataatagccaaaaagctgaagaggaataatggccagagagttggtaaagaaggaacaggttttgggaatatagatcacataatccgcatccttctcaatttccttatggccaaaattggtcactgccagcacaaaggcccctctcgtcttcacctcaaccatgttgctgatggtcttgggataaagattttcctgggtagccacagccaccaccagggtgtcatcctcaataagagaaatggtcccgtgcttcagctctcctgccgcataggcctcagaatgaatataggagatctcctttaatttcagggatccctccaaggaaatggcatagtcgatgccccttccaatgaagaacatatggtcagccgccagataccggttggcaaaacgctgaatcttctccttcattcccaaaagagattcaatctgctccggaagctgggccagatccttttgcatctctacataggcttcctgagtgatctgccctctcacccaggcaaacttcagcgccagcagataaagggcaatgagctgtgcactgtacgccttggtggtagccacggaaatctccggtcctgcccaggtgtatatcacattgtccgcctccctggcaatggagcttcccaccacattcacaatgccaagcacctttactccatggtcctttgcctcccgaagagctgccagagaatccgccgtctccccggactgactgataataatgcacagagtccccggctcatagataggattcctgtaccggtattcactggccagatccacctccacgggaatcctggcaagtccctcgatcacatattttcccgtaactcctgcatgataagcagaaccgcaggccacgatactgatctttttcactgcctgaatgtcctccttggacattcccagctcctctatgaccacgtccccgtccttcagccttggacttaaggtatccctcactgctttgggctgctcatagatctccttcagcataaaatgctcatagccgcccttttccgctgcgtcaatatcccagtcaatggtaaccggctccttgtctaaggcatccccgtcaatattaaagaaccggatattctctttggaaaggcacacgatttcctcattttccatgtaatacacattcctggtatatttcaaaatagccggaacatccgacgcgatgagattgccctggctgctggcccccacaataaggggactgtccttcctggccgcatagatgtgatggggatgatccaaaaacagaatccccagggcataggacccttccaccctgcgcataaccttctcaatggctgccaccgggtcaccctcataatactctgtgagaagatgcaccagaacctccgtatctgtctcagacagaaattgataacccttgccctccagctttttcttcagctttgcataattctcaatgatcccattgtgcaccaccacaatggaatgctctttattaaaatgaggatgggcattggcgtcactggggcttccgtgggtagcccaccgcgtatgtccaatccccgctgtacctggcagaacctctcccccatgggtaagctcctccaaaaccttcagccttcccatcaccttctccatcttgatctggcttccgtcataaaccgcaatccccgcagaatcatatccgcggtattccagcttgctaagaccatccaaaagtatgggagccgcctgctgttcaccaatataacccacaatgccacacatatgccgaacctccttatcaccgattccttcttactctggttttatcattctcctcagtttccgttttattataccttcactgcccgccattactagaaagtctccgtgctttcctggatcccacccatttataggtggctgtttccccatacaccagggcctgcgaagggctgcaatatagaacacccgaagaagtatacaaaaaccagatgggttttttgtgcaaattttccggactatcgtacaacaatacagttcaaatgtcaagaaaaaataggacgccccatccccctggcataggtttttcgcccccctgccatcagccattcttatctccacaccagattttatctctgaaaatattcctgtccagccctttttatgcctgtcttcccaatctgtaacaggtttgtcacaacccttctgtatactgatcaggatataaaaataaaaggagtaaaaatcatcgtgaaatttttaaaagtttttcttatttttctaatcctgctcatcctctgcgctgcctcctgtatcttctacgcttttaaaattgaacccttccgcgtcaaagtaaatgaatataccctcaacgaaagacacccctcaacacaggatataaaaatcgtacaaatatccgatctccatataaaagaggatttcacttatgaaaatctggacaaaataattgacagcatcaatcaactctcccctgatttcgtaattttcacaggagacttgtatgataattatgcctggtttcatgaggacggaaatatcatcactcaattacagaaaatcaccgcaaattatgctaaaatcgccatatggggaaaccgggactacggcggaggcgctgtgcggcaataccagtccattatggaacaggcaggctttaccttactaaaaaacgaaacctggcaggtcacacttgaaaataacaaaacccttttattcacaggcctggatgactctctgctgggggatccccacatgccggatcccaccaaaccttctgcctcagactaccgaatattattgacccacgagcctgatgtggttaacaattatctagaccatgaccataacctcatactcagcaactatgacctggtactcagcggccacagccacgggggccagataaacatcccctttctccctgccattcatgaaaccgctgtgtctgtgacaggactggccacggactataccgcaggaaaatacaccttggataccaagacacagacaaagctttatgtaaatacagggatcggaaccacccacatttccgcccgctttggcgttgtaccggaaattgcccttttccatattttcctataacaatcctatcaagaaaccaatttttccctttggaggtacccccatgcgaattctaattgctgaagacgatgaaaaaatgcgtaaaatcctcacactctatctacaaaaagaaggatacctggtagatcaggtctccaacggccaggaggtcctggagtatttcgagtccaaccaggcagacctgctcctattagattggatgatgcccaaaaaagacggcctggaggcctgccgggagctccgccttctgaaaatccccataaagatcatcatgctcacagccaaaaccacttcccaccaggaactgcagggactcaccgccggagctgacgattatatcaaaaaaccctttgacataaaaatcctcttagtgaagatcaaaaaactctgcagcctggaaaccctacttaccttccgggacctgtccctgaacccggaaacctaccaagctgaaaaaaaccataaaaagctgaatctcaccaaaaaagaatacgacctgctcaaatacttcctgtccaatccccatcggatcctgtcaagagaaaaaatcttggataacgtatggggtatggattacaccggagatatccgcaccgtggacacccatgtccggcgtttaagaaaaaagctgggagacacttatatacacacccgttttggcaccggctacattatgggggattccaatgaataagctatcgaaaaaatttatcttggggatcgccgtgatcctcagcctttcctgcctgttcaccatcttgttcaacaccaattttctggaaaaatattaccttttccaaaaaagaaacaccatcacctccatctgcagcagcttaacggactctatccgcagtggcagttcatccgacacagccatcgagcagatagaagactcccataaggtgatcatcgtaaaaattgacaatccctctgccgctgacccagacaccataaatgatcaaatcagagacgccttccagactaaaggaatcggttttcaaaaatactggctctgggaaaaagattatgaaaaaatcttagacggggaaacccggatccgcttatataaacaagaaaatttaaactacagcctattagtagaatatatccaaataaatggagaactctttgccgtaaccatgatcattcccaatattgcagatgcattcggcattatcaacaactttttaatatttgtaaatataaccagcatcctgttttccatcatctttctggccatttttataaaacgcatcaccaaaccactccaggaattcaagatttttgcatctcacatgaaaaacaacacctacattcccctggagatccacacaaaggatgaattacaggccgtggccgaaagcctaaacaacatgggcggccagatcatcacctaccaaaaatcccttcaggaaaaaaacgctgaaatggaactcctgctggacaacgtagcccacgacctaaaaacccccatttcactgatccagctctacgcagccggaatgaaggacggcttagacgacggcacctttctggacaccattgaaacagaaagcgcccacatggcccagatggccgaccagctcctctacgtctcaaggatcgccaaaaaagacaccccccttgccagcctaaacgtaaccaccctgctccaggagctcacagaaaaatatgctcccctggcaaaagagaacaaaatgttcttttcctgtactctagaaaacgacattacaataatcagctcccgggagctgctaacctccttatttacaaatctcctgacaaacgctgtaaaatattcatccggcacccccatccaggtcaccctaaaaaaagaccacaccacggtcaccctgtccgtcacgaacaaaaccaccaataacgaactggatctgtcccagatctggaccccctactatgtaggtgaacaatcccgcaacaaaacactatccggcaccggcctgggacttaccatcgtcagcaaaatctgccagaagctccactataacgccgactgcaccatgaacgacggaaagatcacctttctaatctccatccccctccccagatagccacttgctcctttcgcccgacccctgcttcccagatagccacttactccttttgcccgaaccctgcttcccagatagccacttattccttttgcccgaaccctgcttcccagataaccacttgctccttttgcccgaaccctgctttccacgttcctttttcctatccgccaggccttaacaaatccaaattttttattctttttttgtcacatggctgtaacagctcccagttaaagtactattcagaaggcagctttgcccctgctcctgtcccccgcccccccggcggcaggcacaaggccagtctgacttcaatgaaaaaaacaatccacaaaaaactacaacggaggaaaccagcatgaaccataaaaccattttaattgtaggaggcacaggctcctggggccagggactgatcaaggaattactcaaagaaaaccccgcccagatcaaggtattggcaagaaacgaatttcagatgataagtcttctcagacaattccattcacccaaaatccagatcctcatcggcgacatccgtgatgaaaaagccctgtcccaagctttcaaaaacgtccagatcgtttttcacctggcagccctaaagcacgtgcccatctgcgagaaaatgccctatgaagccatcgaaacaaacataataggaacccagaacatcatccaggccgccattgaaaattccgtagaaaaagtaatctacgtatccaccgacaaagccgtaaccccccactgcacctacggctgcacaaagctcctaggagaaaagctgatcttatccgccaacacctgccagaatcccacaaaattccttgtattccgcggtggaaatctcattggcagcaccggaagcgtgatccccctatttgaaaaacaaatctccgaaaaaggcattgttaccttaacagacgaaagaatgaaccgctttttcatctccatcccccacgcctcccgcctcctcataaccgccgcccaaaaagccgccggaggagagatcttcatccccctaatgccctccctgcgcatcaaggacatcgcaaaatacttactgtcaaaacacagtttagacgaatccaaaataaccatcaccggaatccgcccaggagaaaaaatccaagaggaactcctttcccccaccgaaaaagaccatctctaccgtttcaccgatgatctatacatcatctccaaagaggacctccacggctgttccgcaaacaacctcattaaaaaaagcacaaatttccccgccatatccagccagtccattctcccctaccaaaaaacagccgaatttctaagaaaggcaggtatctaaatgaaatcatttataccatacgcaccaccgccataataaataccatcctcatcccccctccgcccccctaaaacagggacaaagaaacaccttatgtattattccccaaccccctgcccccatccacaatgatccaaccctctcccccacccctcatcccctccccaccctcacacccctgcgtcaaacaccctcccagcgcccaggggggtctcaggggggcgcggcgcctggcgcccccctgcacttgcattccccctcattttcctgtaaaataccccatatacagaaaggaggaatcttcatgaaaatgatcctatccatcatatccaaagacgacgaaatggacaccgtagaagccctcaaccaaaacaaattcttcgtcaccaaactctccaccagcggcggcttcctaaaagccaaaaacagcaccctcctcatcggaaccgacgatgaccgggtagaagaagccatctccgtcatccaaaaatacgccggagaaagaaaagccataaaatatacaaacctcaacgtgcccggcggctacaactccgaggccggaatgaccatccccatccaggcagaagttggcggaagcaccatcttcgtcctaaacgtagaacaattcaaaaaaatatagcttatctctctgtcataacccctcaaaaaaagccccccagaaagctcacaaagctttccggggggctctcctggctcatccctgccagtcatactctccattttccttcactccataaaaatctccaaagctcaaggaaaaaatctgttccttttttccagccagatcaatttcattcttgatcaaatactgataaattccatcatgggaaatatccccctgctgaaggaagcccaccagcttatcctcccggaagatggcacgttcatactgacaccggcactccctggtgaccacctcatccccttcttccggattcagcttgcccacacataatgacaccagcccaaagaagttaatggtattttttgcagcaaaccggtccacatacatatatttatttcccagcaccatattctgtgcggaaattttcccctgcttctgtgcattgggccatatgccggaaagtccggtcacatcccctgccgcgtacacatccttaacgctggtctccatataaccatttacctggattccccggtcaatcttaataccactgtcctcaaatccagccacagcacttctcacacctgctgccacgatcaccatatcgcagggaagcttctctccgtcatccagaaccacatgggtcacctgtccgtcctcattacagatggtatccgcaccctttcttcccagacggaacttgcatcccgcctgctcaaaaagcctctggtattccaaagcacccttttcatctaactgaatgggaaggatcctgtcagccatctccacaatggtaatgtccttcttctgttccaaaagcccataggccgcatccagacccaccagaccggagccgatgatcaccaccttctgagaaacagacgcctgctggtcaatggccctggcatcacttaaatggcgcagcccaaatacattggaagctgtccgcagagctcccaccggaggaataaagctttccgcacctgtggcgatcaaaagcttatcataatcacaggcgatcccgttgccatagtaaacctttttcctggctgtatccaccttttccacacgctgtccggggatctgccagatgttgtttttttcaaaaaaatcctggggtacaaaatttaatcccttttcatctctctcgtggctgagatatttatgcagcatacatctggaatgaggcttttcatccacagaaagcatgacaatctcatcctcaccagcaagctcccgtatggtacgggcagccatcatgcctgctgctccgattccaatgatcacatgtttcatatgctacacctcctccacatgaattgcctgcttgggacaggcctttacacagcttggctctccgccctggtccctgcagaaatcacattttatcaccacagtttttgtggcatcatccggcttaagcactccatagggacagttcatcacacacatgaagcaggagccgcatttttccttatcataatatacatggccgtcctggggatcctttgtaagagccccgctcatgcaggacagcacacattccggttcatcgcagtggcggcagaagatcgggcggtagctgccgtcgggctgcttatagatgaagttccggctttcattttcaatatcatttaagtccagggtgtaaatgtccccctgatcttttctgtgggcctgcatgcaggccaggctgcagcttttacagccatcgcatttttcggcgtcaatgatgattcttttcatatggacagcccctttcttaaatattcaggccggaacgtttttctaaaatgatcttttccagaatatccgcactttccttggcatctccgttgatgatcacctgtccgccggtgagctgcttcatgtcctctgtgagaaccttagtgaccagcttgcttccggttacgaaaggcggcagtcccagatgaaggggcagtcccaaagccaggccaaagcagccgtctgccaatgcctgctcctccagccactgggcagcggagagcactaaaggaagctgaggcagatccacgccaatttcctttgccagctctgttgccacgatctccagacgtccgatagccagacagggaccgaaattcaacacagggggaattcccagtttttcacacacagcgcgcagctttggtcctgccagcttagctgcagagggctccatcaaaccgcagttctccagacctcctgaagaacagccagcggtgagcaccagaatatcctttgcgatcagctccttggtaagctccacagaaagtacgtcatgtccgcccgcggtcaggttggagcagcccacaacccctgcgatccctttgatatcgccggatacgatcaagtcaatcagaggcttccaggtatctcccaggaatttctttaaggaaacctcgctaacccctgtaagggtatcgtcatttccatggtcaggaaacagattcatgggaacattgcctctgcgggccttgtaggcctccacgatctcatcaatgatctccatactctgctcttctcttttttcaaaaacaaagggcttcatttctgcgttggccttctttgccacatcgtccagacagatctgcttgatcttcagctcatcgcagatgggctcaattcccggaagggtacagttaaactcagacagaacagcgtcgatcccgcctgtggcaagaacagcctcactggtatagttgtttcccgcatgcccctggaaaacctctgtgtagtgggcgcctcgaagctgcaggtcctgtcccacacaagtacagcccaccagcttgaagcctttggctcctgccgcttttgctttctcaacagcctcagggcttttcagtttttcctgaagatccacgaagatggtgtgctgatgcccggtgatcatcacattgatataatccgggtcaattacccgcagtccaaccggggccagacgaatctccggctctcctaacaggatgtcgttgagcaggttggtgagcgtgaggccgtaaagtccggtggagattcccagcttcaggcaatcggtaagcatatccactggatcggaatttaagttggtggaacatttcacaaccccgtggaacacctcacccttggctcctcccggaaggattcccagctcctgccacttcttaaatctgggggcataggccagcttttccacaagctccattttctcatactctggtttatgtaaatcatccagcaccattttggcaaccttctctgccttttcatggatatcctcacaggctactcccagctcctctgccaggtaattcagagcgttcacgcccttgatctcacccttagcctgggcagttttcagtacgttcaaagctgtattttctacaatgtgaatgtagcacccggacccggaagccactgcccgcagaaagtttctggcaacgatcacgtccgctgtggcgccgcagatccctctgggggccttgggggtgatcctgcatggtccgttggaacaaagccggcaacagacaccctgaaggccgaagccgcatttcgtgctctgtccttccactctgtgatgtgaagtctccatgggcagtcctgcaatatagccctccaaaggcttgtctgcacttttgcatgtggaacatccgtaacattgattcatcttataataccctcctgtattaaaatattttatatccaccgggtctccttgtatgacagtcccctgtggttatgacgctgtttgcgccagctgatacatatccgatgcatatccatgaaagcagcccttctattggtgtccttccggcaatgattctgtatgcacctgttaaggtatcctttcaaatattccctgttaatgataccccggaaatgaggaaacgtccatgaaaattcttgttttttcgttccctgtcattgataatattttatcattctggataattttagtcaagtatattttgtgatttcttttcatttacggacgattgaacaaattcagccacgaattatgcaaaagcattcacgaaaagctccagagattatccccggagcttatttctttcccttccagaagtcttccagaagggcctgggcatttctcagggtacaggacctgtagtcggcccactccactggaaacatctgcctgtattcctctgtcaaaaaccggtcatccagaagcagtatggcgcccacatcctcctgggtgcgaatgactcttcctgcagactgaaggactttattcatccccggataccggtatgcataatcaaatccattctcccctctcttgtcataaaacttcttcagaatttcccgctcgcagctcacctggggaattcccgttcccaccacaatggccccgatgagccggtcccccataagatctatgccctccgcaaaaatcccgcccatgacacagaaccccaccagggtaccagactgttccttaaaatgtcccaggaactcctccctctcctcctcgtccatggagggctgctgcagaagacatctggtgccagagggacacagctccttctcaaacacctcatatacatcccgcagaagcttgtgggagggaaaaaaaaccatataatttccttcccggatactggtgaatttctgaatatactctccaatcttccgatattccccatatcctctcctggtaaaccggctgctcacgtcctgtcccaccaaaaggcagcggttctcccggtcaaagggcgattccacatagatcatataatcatccccggcggtgctgaacagcttcttataatatcccaggggaagcagggttgcagaaaagaataccgtccccacacttttacataagtattccctgagatttgtggcaggattaacgcagaattctttgattttaaaccttccgtcctcttccatctgagaatagatcacatagttctcatccaccagctcactgatggacacaaaatctctcacagtaaaatagaaatccagcgcctctttctggatgtccccattgggaggctcctccagaaatttctccagctcacccatcacgttcatcagtaggatgggcagactgccgcagttgtccagaacctcatagttctcgcattccctcttataagccagcattagatcattgaccttattcagtgccttcagaagattccttggctgatagggcttcagctttcttcggaattccagaacctcttccttataaagggctgcactgtacatttcccttccccggtcaaccaggttgtgggcctcgtcaatgagaaaaatgtaatcattcttcacatcatccccaaagaaccgcttcagatgtacattggggtcaaatacataattgtagtcacagatcaccccgtccgtccaaatagacagatccaggcacatttcaaagggacacaccttccatttgtcagcgtgctcttttaatgtctcacggtcatagctgtctctttgggtccacagctcatacacagcatcattgattctgtcaaaatggcctttggcatagggacaggcatcaggattacattccacctggtcacatacacacattttttccttggcagtgagggtgatcaccttaaactgcagccctttttccttcaggatggaaaacgcctcctccgccacggtcctggtgatggtctttgccgtcagatagaaaaccttttctccaaggccttcccctatggccctcaccccagggaaaatcgtggacatggtctttcccacccctgtgggggcctggacaaatacctgttttctggatgcaatggtatgataaacccctgtgaccaccttgcgctggccttcccggtaaggaaagggaaactccaggcctttcatggactggttcctggtttccttccattgaagctgataggacacccatttgtgatattcatcggtgaggcggacgtaccaactctccagatctgaaaaggtgaactcctcccggaagcgccgaagctgctcggtatccagatttccataggtcatctgcacagatagtttctccaaatggttctgaagtccatagatataagcataacacatggcctgggccctatggaccgaaatggggccctccattttccccacatccagatacacgcccttgatctcgtctatggtgacagccccctgctcctccaagatcccgtccgcccggccttccacacacagcaccagatcctcaaattcccgctcctgctttaaggatacctccggccgatagctgctgcccatctgcttctgaatttttctgtgaagacggctccccttctgcatagcctccatgtccatacccccgctgcggctgtccagatccccgcttcttaaaataaactccaccagattccgcacagaaatcctgatcatcggcttatccaactttttcttccttcccaggcgtccctgcgcctcctagctaaactgttacctattatagcagattcctggtaagataagcaaccagcataccaggtcctccgccttctttcctcccacatttaaacttttcatcacgtatatctcatgtctattctgtccaacaactgaaaaaagcacaggaaaacctgtacttttgtatcttttgtgtggactcccaagcaattgccgtcttggcaggatcttctcaatcccctctgccccctgcctggtgaggatgaataaacccaaggttcccgtttctcgttctaagcaaccgaaaacttggcaatggttctgttaaactgaggatcttccccatagcatttcacagttaagacccgggttaaatccatgctcagaattcccaaaatggactttgcgtcaataatcacccgattataaaaaatatcaatgtcaaaatcgcacctgctggcagcattgacaaattctctcacgtcttctgttgctgacaatttaatccgatgttccatctccggtgtcctccttcactctaaattatcgctttgggcagatgctagtattttactcaattgtcagccaatgtcaatggggtttaaaatttattcatattttttggaggatatgacaaatttcccctttgaggtattttaccatttgtcgaaattatggcaattttgtagaaattttaataaacttttaatattgtcagttagtttatccaaactatatttccatatctaggaaataccaagggttccttgaaaagaagggccatagccgccggagatcatgaccggtccagcatctgcgcttagcctctgctcacaggaaattccagcatattttttctaaatttcagaggaacaaactgctgctgaagcttcagattcttacgctcctccacagcaatgctcttacagaaatccttccacaaaagctcatactcttccggccaagacagctcctccctggcttccagggggagatccagatcttttctcagataactgactccgtccctgggatggataagcgccatccttctgccttcatcgtagatcatccaattttctctgggataacggtttgaaaaatgaggactcagcagctccagcacctggttttccggatgaatctttgcgaacaggatccccccgggcagctcccggaatctgacaaactggcggaaacgctctgtctccgtccccacccgcttcttaagctcaaatacccggcgtacataaggattccccagattttccataactctggaatccttcctgcctcctgccagagcctggaccagcgtctgatagatggccgtacacttctcctcctccctggaggcagcggcgtaacacacaaactcatagaccagctctcccaaatccctgcggatggtcctggccaccttcaccgctttctcctgatctgtggccaccggaaggtatctgcagaacagctccagattttgaggctcctttgtgcggatctccacatttgtgtggccgcagcggctgtcccaggccacatacacagccgtgaaaataccctccaggctgtcttcacaaatataaacaaacttctcttccattcttatctaccgccaacctttcttgggcacacctggcctgccccatcccttactgttcatagtgctcattccaggccggacctgaccccttggcacctataattgtccgctcacacttgcagccacatcccaggcctggagctcaccggcaaaattctggtcatcaaacagggaaagctgctggtaggtagataccgaatcttggcatacctgccgttccctgggatccagcatattccggataatgtaatcctcctccagcttggtgggatacatcatcttcccattgcaggtgataaaataaagtgctcttttcaacaccacacctagcttcttcagtccgtcaaaatccaggcttccgtattttctggcgcccacgatcttctgggcggaccggacgccaatccccggcacccgcagaagggtagaatagtccgcccggttgatctccaccggaaaatcctccaaatgcctcagggcccaatcgcattttggatccagcagaacattgaaattgggccgttccttagaaagaagctcactggcgtgaaagccgtaaaaccgcagaagccagtccgcctgatacaggcggtgctcccgaagaaggggaggtcctccgggaagcataggcacctctgcattttggttcacatccacaaaggcagagtaaaacacccgtttcagggaaaattgatcatatagggactctgacacagacataatctgataatcactctctcctgtggcaccgatgatcatctgagtgctctgtcctgcaggtacaaaagggggagcacttttgtacactgccagctcctctttgctctgacgggcccggagctggatctggcgcatcggctttaatatggtatttctgcttttgtggggagccagcttcttcagcccctctgctgtgggaagctctaaattcacgctcattctgtccgccagatagcctgctttgtcaatgagctcctgggaggccccgggaatggccttcaggtgcacgtatccctgaaaattatactgcttgcgaaggagccacacagtctggcacagctcctccatggtggcatcggggctgccttttacgccggagctgagaaaaagtccttcaatataattccgtctgtaaaactccacagtgagcctgcagacctcctggggagtgaaggaggcacggaccacatcgttggaagcacggttcacgcagtatttacaatcgaacacacactcattggtgtacaggatcttcagcagcgaaatacaccgcccgtccgcagcaaagctgtggcagattcctgaggcgctgcagtttcccagccctgtgccgtcatttcttcggttcacaccgctggatgtacaggccacatcatacttagctgcatcagaaagaatattcagtttttcgccaatggacatcttctcctgaaaaatcataggttttccctctaggttttctttttatttcttgctctccatagaaagacagcaagaacgtgtgttctattcaaattatagaacgcacgttcttgtttgtcaagacctattcttcctttttcagaaattttctcgggccgcccctgtctaacccaataattcttcagccatcttcatacgctctgccaccttcaccccaaagggacagcgggtttcgcagccgccgcactccacgcagtcctttccgttggcagataaggcgcggtaatgatctctcactgctgccggaacctcttcctggaccttggccaggtcatacagcttattcaccatggcaatgtcaatttcctttggacatggggcgcagtgtccgcagtaggtacactgtaagcgatgaataatcacccgtccacgacttacagtggacctcaaattgtaaggtccccacggttttccggtgtttctttttcagtatctgttactccagaacatctctcttttataaagtcactccatggcatcagctgttctatgcctgcgggctcttctttatagtccagcatatacagcaacagggtgtacagatattgatagatattcaagctgttcgcttttgccgtttccacaaggcttaggacaactgcactcgcgtttgcaccatccacagtgtcatggaacaggaagttttttctcccggtgacatacgatttcgctctgcgctccgcggcattgttcgagatctcacatcttccgtccaggagataattcatcagggtttccctatggttccgggcatagttcactgctttttccagcttactcccaccggctgggtctagcgtatccagccagtcccagaactcatcccatatagcgggttctgttttttgacgcctctgttttcgctcctctgcagggagttctttataaagacgttccaaaaagaacaggcggttgcaaaatacaactcccttttccgctgggagcagggtatcgtcagatgctgtcccttctttttgttcagggatcccctgctccgaattgatatccagaagcttcaggttcttctgacgtgctctgggtacggcttcaaagaatttacgcctgcagtgggccaggcagcacaccaggatcacatcttaaatcctgccgtatgccgaatatccatcacaatggagcaatccggtaaacccggccagaaactcaataggataatccccattccttcctggctggtaatcatacaggatgatcggcggcaggccgtctgtcccacttaaatatatccacatgtaggattttgatgttgctgcttttccttcttcatggagtacctggcagggaacttcatccgcatggatgacttcacgcttcagcagttcctgatgcagtgatctatatatgggaaacagatactccagggaacaggtattgtaccagcgggcagcagtttctcttggtacaggcactcctttctggagccagtcctttgactggcggtaaaaaggcagatggaggaaactcttctggtacatcaccatcgccaccatatccggggaagccggactatgcgcaaggagcggtgttggtgtttctgccgctttgatagcggtctcatcctcctcgcggcagaccggacatacgagggtttcctgcatataccggacccttactgttttttgtcaagcacttttccctaaaaaaaagcgtcaaaattcccttttttcagcaagggaatttccctgctttcggcgggtagcattatgcatccctgcgcataagggcatgctccatgcggtagctttttccatcgaatatcagcaaatgtccatgatggaccagccggtcgatcatcgcagccgccatctggtcatctgtgaagatacctccccacttggaaaactccagatttgtggtcagtaccaggctcttgctttcgtaactgtcagatatgacacggaacagcagctgggatccgtccttgtccacgggtacatacccccattcatccagtattagaaggtcaaggctgcgtagttcccgcagaagtctctccagtgtgccattcttccttgcttcggccagtttcaacaccaactctgtcaccgtgtagaactttgttttgtacccaaggttacaggccttcacaccggctgcaatcgccatatgtgtcttgccgactcctaccggaccatagagaaccagatttttcttatcaggcacaaatgtgagggattccagttcctccctgcagaatgcagggggaaacttaacgcttgcgtagctatagccctcaaatgttttataggttgggaatcctgcacgcttgatcagacgcttccggcggttctcatcacgcagggtaagctcctcattcagcagctccatgacgaattccaactgtttctgggtgcctctttccaggcacgcctccgatatccgactggaaagaaacagctgccggcttgctgtcaggatctgtccacagaagtcctctttcatctttggtgtcatcatgatgcctgacctccttccggcaaaaatgcttcgtcataggcagacaatgccggcccgctttccggcggtgtataaatgccataaccggtgatacgggctgcaagtaccgcagcatcgcagatgttgatactgcctctggcacaggccatttccattgccccggctgccgcctggaaaccatactgattggtaagttcattcatgatacgcaggcagtctttgagtttttccttcggctgctcatccatatagacacgaagggcatccggtgtttcccggcgcagtccgctgttctcccatgcccctgcatttttcatcagaacagcgagcgtggtgctgtaatcactgatgtcggtccttccttccccgaaagctctgtggtgggtggtaattacctgccctccttctgtcaggatatccacggtatgcgcccggatgccgaccagcaccttctgataggcattttcaggccgggtggaataaaagtgctttccatccatgcatacctttccatatccatccgctttgagccactcatagcggcatacctggaatctctttggcggcagcatcagaagtgccttgcggtcttcctcaaacaattccccgatggggatctgttttttataatggagttctgccgccttcttctcatgccacatcagcagtttccgattatagctttcaatctctgtaaagtgtggtacaggcacaaacaggttggaacggttaaagtccacttttcgttctacgtttcccttttcccatccggaatacggattgcagaatctcacccggaaatgatagtgggcgcggaacctggaaaagagttccgtttcatggatggcgtccccgatacggcgtccaactccggtagcattgtcaaagatcaacagcggcggcacaccgccgataaattcaaagatatcctgcagtccctgacagacgcattccgctgtctcgccgccaaatacctgagaataaccgtcattgctgtaagggaatgatacggtcaggtacttcttcctgcaaagcttgcctgcttcataaaaatcagcctcaccgaagtcaacctgtgcgggacccggatcccagaccagttccaggtttgccttctccatctgggttgttcggcattttttcaggtatcgctgcacaacgctatagctgccgtcatagccgtgttcgtcccgaagccgttcaaacacacgttgtgctgtgtggtgctgcttccgccagtgttttttgtcctcgtcaagccattcctggatgactggcttgaaagaatccagtttcgacggtttttcctgaatgatcggcagttcaggagagaagtcctcctgggcaaggtatttacgaatggttttcggatcggtaccggtttttttagaaatttcactgatacggtatccacaattgctcaaatctttgatatgattgattggggacatagtgagcatcttcctttcctcctttatctttggttgtgcttagataaaggataaatgtattgtgaggttgtttcaatatgtcccgccttttttagggaaattcccttgctcttttcagggaattctgatgcttttttcgggtgattttagtgtatcataaacaccttaccactttcgcaggggtgatgcgcagttcttcccggacaaacttatatcccagatggtccatcggcgtatcacagtccggacataagcgccctgttcccgggacgtcacaatggatctcctttaccggaagtgcctcatacaggtctgcacgcagggatttcttcttccttgtgcgtgtatgtcctttcacggttgttgttccttcgggtgtctgttcctctgcgggatcggcttcctgagcatcaccgggacaggccacggatgtcttttcactggatgtcccaaagagcttccttttgagctcgtccagcgtttcattcagatttgcgatcgttgcctggagagactttatagttgcccggagatccgctatcgtctcttcctgttcctggttcgttttcagcaaaagctggatcgtttcttttgtattcagcggcatgtctgttcccgtccttcgttttcttacatttattataagaaaatatgggatcaatggcaaacggttgtgctggccgccaccgtcattttgacgggatactgtttgtggatatccttccggaaaaaacagcctgcaggggatccctggcggcttttcctgaaagatataccacaacataacagggtatagggaccgtcacagccgggtgatccacataccgtttaggtttggggaagtccatggtggacaagtccgtttcctggtttcaggacatggacttatcagtttttgaaattctctgttttgcacaaaggctaaaaatccttcttttttccgtttgttctgatggcctttggctggtcgatagacagcccttccatgagccagcggaattcctggcgtgtcaggaggcgggcttctgaagcattccggggccactggaaccgtccgctgccatcaagccgtttttgaagcagtacgaatccgtctttatcaaaatggagtgccttgatcttgcggctgtccctaccgcagaacagatagacagcatttgcataaggatccaactcataaacatcacggatgactgccataaggccgtcaaaactctttcttatgtccgtccagtgatcacgaatatttttgatacaccggacagttcacctaacataatctctgcaacgctgacagggtatgaaagatggtctcgctatctgcaacgttagtaatgtctacctgaaggccatggaccatgatccttatcgccgtttccaaagagtcattcctaacggagggctcctccttcggtggacatggggccggaacctcaaaggagagttgtacgatttccggtgtttttgtaaacgctggatgagccggttccgggattttacaggccattttccgcaaccttcggatctgataataaaagctacttgtgtggatatggtgttccgcacaccagcatttatcagaaagcccgcttgaacggcattcccggattaggtccatccattcttcgtcagtgcgtcttggatgtcttttggtcatagataacatcagctcctgttgctaaatttggagtgaagttagcacaggccccaaaagagttgaagtaaaatggtcctaagtgcaaaaccaggaaacagcagagataccgccccatagaaagattatctcatagtttttttataatggaaaaccggtaggttattcgtcgcttacggtacactggccaaaatatgcatgagcaggagcattagccagcactgtggcatagtccttctcctcctgagaggcagtctcgtaggccacggcctcatctgctaatgtcaagtaaggactaaaaaaatcctccggatttttccgaagggttattaaatttattttaaattttccgcaaaacaatcagtattatatttttcactctaattatacttaccacattcttattcttaaatgagactttggagaatgaacgaccccgcagcaagctgcggggtatcaaaagacaaacctcgctttgctcggtattagtttgttacgcagcagagctgcggggaattagaccctgagagattaaataacagtgggtttatcggtcttttatacatacatatatctgatgtcgcgaattattagtcatttcagacatatcatattctccatacaaattttctatcctgaatcctgtcaatctcaatatttcttcataataactcacatcacgatacgcaaaaggaaatcttgccacttctttttcatttacatagacgctgcaatccattaattgtttattgaaatcatatctgtaataatcctcaatagatatagctctatcctcatacatttttatccgaactctgttatggttttcagcccactccctatcaaaaatataatgatcaaaaagaaagtgaccgccatactttaaattcatgcgtattcgctcaaataaccgtataacatcctgcttgtggattatatgaccgattgtcctaaacggcaaatagatacatgataccggatttgggagagccaattcaagcatattttcttttatcagtctaatatttccaccacgatgattcatactaatcttcttactagccaatgcaagcatttcttccgaggtatcaataccaatgatatttttatgatactcctcaaccaaggtgcaggcaatccgtcccgttcccactcctaattccaccaatataccatctatgtttttcaaataatttatatagaaatttttacaagagacataggccatatcccctgtacaccatttttcataaactgctgccaaaccatcgtacgcttcttcaaaaatattgttcataacacgcactcccatctggacatatgattacaatgtactgattctgactagaatctattatctttctggcaacatgatatgccatacctgaagtaatccctacattaagattataattttcgtgtaatttcctacactctcggatgctgtcttcatctttcactatttcccatgcatcaataagatccatatgccttaaaatattacctggttttcccttcatacctgcccccacactgagatatttatattcctcactaccaaaaatagtggaaccataaggttctactccaatcaatttaatatgcgaatttttttctttcaaatattttccggtaccaataatcgtgcctcccgtgcctacggaacatattaaatgagtaattttcccattggtctgctgccagatttccggtcctgtggtttcataatgggcttttatggccatcacactgtcatactgattggtccaataatatccctggcactccagttctttagctcttcggatacgcgaatcacgaaaatccagaccgtccacttgctcaactatttcatatgacacgccatttgattttagcttttccagcttaagataaggtatcgtctcatctgtcaggcataaaaactgatatcctttcaaattacagaaatagtgcagtgccagtcccaaattcccgcttgtagactcacatactttaatccgttcttttgatgtattccttttttcgttaatcccatcaatcatataatatgcaattctatctttaatactcccaaggcgattaaactgttcgagtttaaaccctactttattcccacacatttcttctacttgaagtggtgtatctccaattccgtaatccatcagcgttttcatacatttacctttcgcaaagaaactctggagcaaaaactgcactcatgcacatatatatcctcttccaacaactctgttaattctttctctgtcaaacgaaatatattaccaatactatcctgctcctgccaggagcagactgccatgtcaccctctgtgcttacagacaggctattttccacttttaaataattcacttcaacacctttatccgccagcatcgcctgttcttttcttacatcctgtattctttttgtggataacatcaatttagcctcaccggatatctgcattttagaaaaatcccgtaaaatctgtttaaaatccctggttacagacatttgggcaaaagcgcctctcccaacaggttgaaattcataaatctgaaaccgtgcgaatccaagactcgacaaatatggaatcccttccgtaaatatggtatcctgattacctgcgtgaagtgtcattcttaatatcactgggattttctgttcctgatagtataacgcatatctcagaacctgccgcagatcactatttcgaacaaggccatgaatctcctgtgtgtgcccctctatggaaactctgaagttgccaattcgccttaacatatgtataacagatggatcttcattacgaatggtcccattcgtagtgatcgtgatgcgcttcaagatttcatcttccactttattcattgccaccagcagatccggatataagaaaatttctccgccttccaaatgaatatcgcttttataagcagtattaaaaaagcgtaaatagtgtattacatcctcaattgcaatatgtgcctcagcacccgcaccgctatcattatagcaatgcttgcatctcaaattacagtctgtatttgtatgaatatgtaaatcaaattctttcattttaaccacactttctagcaaatcagaagagtacacccctggcttcccccaaaccccggatttaccaacattgccttttgtccttttctaataattcccctgtgaacgtaatcaaaataatgataaaaactatcgttagaattcatatgtccagtatttctgatattttgatccaagaatttgctacggggaattttagcaagagtacttacctgatcccatatttttgtattcgatgtatggcaaactataaaatccaattgctgcaaattcaaatcgacattttccaggcaattataaatagcagtgcggacaaaagccggattagctgcacgaaacgatgctatagaatccgcatcagaatataccccattagatgcaataatcatagtattaatcgtcgagcttatcacttcatgcctcgttgtatccttttctatcatcaacccaatcgcactatcactcattgccgtaccaaaaaatatcctctcgaaattttcataacatttatcaatcccgattacaagtattctttcatagcttccattttctatcatcgccactgccatttcgagccctttgtgcatgatacaacatggcaggccggaaatacaaatcatcggtaccccttctatgcatctgattttacctatactacctaaaagatatggaagtgaatgtgtcaaaatgatataatccggcctatctgtaaactccatcaacagttcctccaacatatcatgtgccgacttctcattatctacatataccatttcaagaccattatcctttatatctttacataattctttattctcagtcaattgttctattggtaaatgacgcctcccaagaacagcatgcatttcagatattccagctctcataatccgtttcccctataaatttgtaataaaaatatctgcaatcttatcctcaagcttctgcaactgtttccaatcccataatatattttctgtcttatactttttcagatggtatttctgtaaagcaattaacgatatctgtctttccaaaagttctaaggctaattcaagtcctgtaaagccaacactctgatgccaaataataaaatccttttgcagctgttttctgtacatcaagctatttgtgttaaacagcatattgttaatttccttagcgtttaatgttttccgggtataagcctctacctcaagaaacggctgtttttcagaagccctgataaaattttttcggatgattttatttgccctcaaaatcgcctgtgagtgatctttaacaggaatttgttttccaaaaatataatagcagaaattggttccctcattaaattcaccatcagaattcagcatctttttcgcctgtgttccggaaatgggaatctgaataaagccatcagaatctgtcacatatatcatatcttcccgcatagattccagtgcaagataatggtccacgttactgtaaaaggatgaaaagggaatatagaaaagcttctgcatattaaccgggcccaaaactatatgaaattttcccgtttgaacatcttcaaaaagattatcccaaaacggctcgtattcagaaaatgttttccgttctacgaacattcccaatatttctgccgctatttttattccgtcaaatggctctgttagggttgtaatgatattttcgtcgctttttaacccaaaaggtactccgcctaacatctcatactgttctgcagatacgggcaacatttttactgcattttcaatcgcaaaagagccacagctccagccaaaaccaatatactttttcatctttccctcacaatttcagcgatttgtcttttgtcaaatttgccgtttgatgttttcggaagcatatgtcccaaatatacaatgcgatgcggtcttaagtataccggcaactctgaaatcttctgttccagcttcctgtggtcacatgaaccgctgtaaaccgttacaatttgctgtcctaaattatcatgcggaattcctatcgtacagcattccttcatttcctttatggcattgagcagaaagatatcaatctccctgccactgattcgaaaaccgttcgactttataaattcggattttcgttctacgaaatacagatatccgtccttatcgcaccgaaatatgtcacctgttcgtagataatgctggtttctcttttcgtcgtaaccaaagctctttttgctttcttccgatgctttccagtaccccttcatcacattaggaccgtaaacaatcagttctcctgttcccacttctccctgttcataatctaaatctacttcaattccagggagtggcaaaccacaagaaccctcgtattttttaccaacatcatctaacggcataatagccactctcttacattcggtaattccgtacatcggcaccactatggttccagtaagcattttctctgtctcttttatccattctaccggcaaagtatctccagtagatgtaatatagcgcaattttatgcctgaagtgcgttgcagaagatgggattttaaaatcattcccagcaaagaaggtaccaccggaaaagctgtgacccgtttgtcaaccagcattctgggaatcatggccaccatcggctgcctgctgatatagaaagatgcttctgaatccagagctaaaaacaattgatacattccgtaatcaaaagccatcggtaaacaattccaaataacatcctcttttgtgtttttcagaactcgatttattgcatcaacagaaaatatgatctgactataccctgccaacacacctttcggcagctctgtactgccggaggtatacaaaatatatgcatcgctttctggatctatctggctgcgttcttctaaattatccatatcctcatcacatttccatatctcttggaaattcagaaagggcacatctgtctgcggcatccaagccgcactctcgcccataatcagtatggcatcactgtttcttataatatagtctttccgctcgttgagcatagattcatacacgattgaataacgaattccctgcgcaatacaccctaatatgacaatgcacgtttctatgcagtttgcatttacgatcagcaccgttccattcttcccataagctgctattcgctttgaaaaacacattacaattctgtgcaaatcgcagtatgtaagtgcatgacaatcatccgcaaaaacactgctgctgttatgcagatgactctcaatcagtttgtaatataacattttttcattatctggagtcccgggcaggctcctccagattttactccttgtgttagtttgattttgcaataaacatactgaaaatactgctttttcccgcattattttcgatcatagtaatggccgctgtctcattttcccgggcacagataataaactgttccaaaacaagatataagtcagcctggctcttcatcaaaaacgccagtggtttggtcttattccatttcatggcatccaaaatcatatattgtggggctgcacaactaaattcctcccaattacgcaaatcataataataatccggcaccacattcttacacacggtatttaaagcagtacatattttttccctcacttcactattataaccatatccacattcatattcctgccctctattcaatctttcaaatgacgaactatagaaaggcaggacatctggttttctacatccttcatcccattccaggcagttcatcgaaataatctgtattttcatactatttgactccatatttagattgaacaaactgttccaaatttcccatggtctgaaaaatttcttcaaaatcatcttccaatggattaaactcaaaaccaaaattatcttccagcacgacctgtaatgtaacaatatcaaaagagtccatctgtagatcgtccgctaatctggttacatccaatcccattaattcctcttttcctttcagctttggtatgttttccgtcataatctcttctagccgtttcctcatttcacttctctccaattttcgtccctccattcaatattcctgtatcatatggttctctaatacaaactacttcacctgactgcctccgaaaatatacggccggcagttctcgtgataaaaacagctgcattccatctgtcatggtatatgcaccaacgttttcaaaaataagataatccccctcctccgcttcccacagttcactgtcatttacgataatatccgccgcagtacaaagcgatccgcaaaccacacattttttgcgctcttttcgctgcggaatttgttttatatagggaagcctccttccatattgctgattataataagttaattgatgcgttcctccatctgtgatgatgtatgttttatcatgttgcctacactcaatcacctttgttacataatatccacatgaagctgccagatatcttcctaattcgtactcttgcttatacccgggcaactgatatttcatctgtgcaaccgtttttacgaaaatattctgatgcgtattttcattctttgttacaaaatactccactggtgtaccgcatccatagacaattcgacttatatgtgtcaaccgcatcccatttaaatgctccgcagttttccttaacagctccaaatgctgttgctgcttcccttcatccctgttttgggtacctgcatagatatgcaggccatctatttgtatctgccttcccacgtactttctgcatacggtttctgcttcttttagcgacataccaaactgatttccaatatcaagccgcaaggcaatcacagcaaagtaatccttttgcttcgacaaagaattcaccaatttctccatctggcgctctgattcgataatatagttccttactccatatccataggcagcatcgatataatctgtttccttgttgattcctgctaagacaatctgttttgcctcaatttgattacgtatacagattttaagttctcctaatgaacacacttcgataaaatccacataagccgccgccgtctttgtcaaaaatggattcgctttcatggaaaaacatatagccgcattttcggcctctttcctagttttctctatctgccgaataaatcgttcttcatccaaaaagtaaaacggtgtgttatactgcttcaattttgagcatatctcataattaaattccatatattctcccacatttttccaacaagctgcgaaaatttgattctatttcctcaaattgctcccatttacaattgaaatatccttttgttgcatttttcaagtattcttcgatttcttctctcaaggcatgcgcatttgtatttttttttaccatactcaagacttcataattatagaaaagaaatagccttagcccataacgaaaggctgccatctcggcgactccccgacagggccctaatataatcttcggtctatccgattctagatagcattgaattccttctttcataatatgagaagggtcagacagtttaactggcagcatattctctattgtaatgctgtaacatgcttcttgttttaatatttccataagatcatctacctccacgataatgcatggagaactgtccggatcatggataattgcatatttaccctctacatcagtcaggaaaacaaagtgttttccacctataaaatatacgtcctcaacggcttggcttaaacgttttcgttccagcgggccaagcactgctcccttttccgccatataggataaatccttgcaggttataccttctattttcctgacttttacctgacaaccggtgttttttgcaatattcccaatactctcctgcacagaaactgcagtgtgaatccactttttaatatctgtttcatattgcatccgaaaacatctgccggacataatgtcgaaattccattctacatcttcttgcattgcaaaagaaaataacattgaaatacagtctgaaaaagaatccggattttttatactatgtattcgctccattctaatctatcggctccaaattcactaaaatttttcttgctctagtctcttttgcgccttttataagacatccaagagcctcaacaatctctttgcagaggcccgaaatatcctctatttcctttatgttcttcccggcactatacgcctccaaagccacatcaatactttttcctgatatctgttccttaattttttctgcttctttcatctcctggctgctgaatctccgataacctgttacctgttttcgattcaaaagcatataggacaaatcgtccatatcgtcctcgccctcccagaaatctgctgacggtgcctggctcaaaacattttcttttgtccctacaagcgttgccaattcatacacctgcgttttatacaagtgcgcgatcggacgtatatgccccagcatatccccccaaagcatacatgcgcctgtttccagctcggttctgtttgtggtagaacagaagataaaatcgttttcattatataacgaatatattgccactctcaatgcacatttagctctgtgagcatccataaagctatccatatttagatttttcatgtcgcctctatgcattttatgaaccaattctatgttcatcttctgtaaatctataatacttaactcacattgcagttcatcggccaattcccggacagtactacatcgcttttccggcaccccttcctgcaccacaaagaaaaggtgtactctgtcaggcgaaagtgctttcacacataaccgagctaccacatccgaatcgatgcctccggacaccccaagcactattttctcattttcatatatataatcttgtatcaacctgcaaatacgccctacttctctttctgttacctttttcatctctacaatcctcccaattcacacttaagcctctcgtaacaggtatccagctgtacatagtcaatacccgaatcgaaatattctgctttgtgttccttgcgacagtcgcatggttctgcgttcattttcagcaggattttccgacgttccgctccgctttccgcacagttatatgcaagccacaaatccatcatcggcttataacatacattgcaataataaggtgtaatcatatcatcctgccgatatccagggatctcgatcctcggctctccataccatgctgtatttatgttttccagttcttcttccgataaagccagcaaaatatctagcaaaatccttccatcgggtggcgaatacatcttctttatatataaatggtacatcaaggtatacttttttatattcacaggaaacagaactataaagtcagccttatagtccaacagttttcttatggaccgtatcccatcgcatatttgcgcatctctctccataaagggaaaaccagtcatcacatttgcagtcaccttaaaaccatagcggtgaatcatatcaattgtacctcgaatatttctctgaaacggtattttattaagaatgaatctctgtatgtcatcatccaatgactcaattcctatttcaaaaaagatatccagtcttccttttatgctatgaatatactttagaattcgctcatctatggttgtaatatgtgtttccaacacaaaggtttgcacctttgtctgcctggtcagttctataatctgggaaagcacttctcgtttcaattccgcttcgtccaaaacactcccacaagtattcaaaacaatcgtatccgtattaggctgtatcttctttagcgcaatcttaaatgcttcaacctgatcggtgtccgtttctccctgaaagtaatcacagcaggtgcagctgccttgtttactaaaacggcacgcatcactttgcagccatatctgagccgtgctgctgttctgacaaaccgttgacggcaggctcttgtttaccactggacgcagaaggcggaattgattattccacttcgacagataacagttggctgaatcactctgatatagaccatatttcttcataaaatcttctctattcatttttttattaccccattatctatatattctctcatgtatcttcctgtataagaaacatcactctcttcatacaaattgtccggtgttccactgaacatcaggcatccacctttcatccccccttccggacccagatcaataatccaatccgactggcagattatttccatattgtgttccactactataactgtgttgcccctgtccacaattcgattcagcactttaatgagttcagcaacatcctgaatatgcaatccttttgtaggctcgtctatcaagtaaatctctttcttttttttaagtctgctcgacaattttaggcgctgcatttcaccgcctgacagggtattaagtggctgtccgattgttatgtaacccaaaccgacattataaatttctgtgaggtctttcatgatatcctcttctgcctgaaaccatcggagcgcttctattattgtcatgtccaaaatatcagcgatgtttttgcctcgaacagtcagctccaaaatattctgcttataccttttgcccctgcattcctcacattcagaacgaatttcccccatgtaatgcatatctgtcacaatataccccagtccattacagtttgtgcatgccccttcactattaaatgaaaaaaccgagatactgacacctgtatgatccgcaaaatattttctaatcttatcaaacagtttgctataggtaccaatattcccccgcacatttcgtccgatatttccctgatcaatgagtattgcacttggaaaactctctattaattctttcattaatgtactttttccagcacccgacactccagttattgatgtaaacactccaataggtatatccactgaaaaattgcgtaaattaagtcgatttatcgggccaatgtgaatcatttccagggggctgcgaaaatggtgctttacttccggtttcagcttgcggattgcatttgcagtaatagaatcctccccctgcagaacctccgctgtcgatccctgcgcaacaattttcccaccatctttgccagcccccggccccatatcaataatataatcagcttcataaagcatttgcaggttatgatcgatcataagaagtgtattgtgcttttctacaattccgcggcaaattctggtgatacgactgatgtcccttgcatgaagccctgtagtcggctcatcaagaatataaatcatgtccgaaagagaatttccaagctgtcttgccagcttaaccttgtgagattccccgccagataaagtggagacggagcggttcaacgttagataccccactcctacatccatcaaattcttcagatcctttagaacagatggaatgatggtatcttctaccagaccatgaatatcctttaaaacctcgtataattcacaaatttccatactcaccagatcgctcatccgcaaaccatttcgaagagtaactgcacttgccttttcggaaattcttataccattgcatataggacatttctcatttctgaagaattgctgatcatattgaacggaagacagccctcgctcatcattcaagcgcttcttcattctactgacaattccttcataagtaaagctttgtacatggccagcgtttttatcatcataaacaaaaggaggagaattcagcaacagttccatttcactttctgtgaacaatttaacaggtttgtccatatcaaaccgtccgatttccttaataatattccagtatcttcctcccaccttccaagttttatgcataattgctccctcattaaggctcttatctaaatcaatcagcgccttaatatcaggttccatagattcccccaaaccattacaatactcacatcttccttccggattgttaaacgaaaatgccccagcattatattgaggctttcctgccctagaaaacagcagcctgagacccgtgtagatatccgtataagttccaactgtggatcttggtgtatttggaaaagtgttttggtctatcactacacaaggtgaaagccccgaaattgatttgcaatctacattggacgctttcggcaaactccttctggcataagaattaagagtttcaataaagtcatgctgcgcctgctcataaataacatcgtgtataagcgaggattttcccgaccccgacacgccacttactgctacccattgatatttgggaatctttaccgaaagattattcagattattctgctttaccccttctatctgaatcatactatagtcactcacgatatatccccctttccgtcatgcagccgccgtttagcataactgtttccatacgttttctcatacagataagccctgtcttttgcgagtatagaacaaccgggggaatatctctcgtcaaaaatgttgtcatcccctccgtgactgaatatgcaccaatatatgcaaaacataaaatatctcctatctgtagattctgaaagggaacccgcctgctaatcaaatcattatgtgtacaaaggctaccacagattgcccattcttgaaactcattttttcccatattatcagtttccttacatctttgcaaaatacataccggtggtactttcattcccatcatctgtccgtcataatgcagttgatgactcccaccatctacaattgcatatcgaagccctccacagcacttcaaatcgactacttttgtcaaatagtatccacaacaagctgagaaaaaacggcccatctcaatcgttacatgataattttgcacaaactctcgtaagacatatgcagcttctttcagtaattttttttctgcttctgccggccattcggaaaagtaatccgcatctaatcccggtccatattcaatctgctctaccgcatacccaaatttctcctttatttcccggcacaaactctccagcttgagcaattcctcaccaattttagaaacatcccgtttctgtgatttatcaaaaaaatgaattcctgcaaagtgaagattatacttatctgcttcgccaattatcgttttaatatctgcctcatccattccaaactgattattagtaccaagccttaaaagtatattcaattcaaccttcatatcctgggcaacttgttccagcagctctaactgggtcaagctttcgcaggaaaaacagcgcacaccgtatagtatagcatcctttatctcttcttcctctttataaactcccgtataaaaaattttttctgcttcaatttcataattgcggcataaacaaaattctccataactacacacttcaaaacgcgagacaaattccggcacatatgcaatcaggaatgggttagctttcacacaataacaaatccctaccgtgccaaatgcttctgctacagtttttatcctactttgaaaagaatccgtgtcgaatacatatacaggtgttccatacgttcccgacaccattgataatatttgtttcatagttaccccttgtatttctgaatcaattcccacatagcctccacgctattgaaattatctggaaccatatcctgaggttcaatttgaatatcaaactccgagcaaagaacagaaactaaatacacgatttgaatagaatcatacaagcgctcgtcaatcaattgtctttcgtgctcataatcaatctccgaattgatttctcgcaaaatatccaataatttctccatttatctaaatcctttccagttattctgcaaatagtatcgatttattttcccgtttctgttcagtggcatttcattcacataacaatatacagaaggtctcatatatctttgtaactttatccggcagtaatgttccaatttcttcctctcctcgcatgtattactggccagctgtatcactgccacaatccggttatcatcaaacaaacacacggtattacaaacacctttaaccttcataagaaccgcttctatcccctgaagctcaattcgatatcccatatattttatctgataatcattccttcccgtaataacataatttccctgtttatccaatttgcctatatcaccagtatcataaaattcttctatcacaccattttctgtttctatttccaccatttctagtttttcgaatccatagtctgtaaaatatcccagtgccagcgactctgatttaagcaacagttttcccttgtctgacggtctcatctgctcatctacaaatattaatttacaatgtgcaaaaggttgcccgactgcaagctgttcctgattaccttctggtatctcataccaagcacagattcctgccagttctgacattccatatgtattgtaaaagctaacaagcggcattttttctctccagtacagtaccgtttcaataggaacctgttccccaataaatatggcttttcttaaggatttcggtatttcaactcttaaaatatcaaaatgtgccactagagaataagcagaaggaacccaagatattattgtaatgttttctttattcatataacgtatcaacatatacggtaccgcaaaaaacttttcaggtactattacaagcctagccccaagataaatcatactatatatatctttggctgatgcatctgaatagaacggaataccatttccgataatttcccggcttgtcaaatgaaagacttgaatataattttgaataaataattccatagcctcatgtgtcttcaaaataatctttggctttcccgttgtcccagatgtcaaaacggtatataaacaatcctcagcctccatctcagcataaaaagtctctgtatctgaacttatttccgatgtgacaatacatgaaactttgttttccaagccgaaattcacttcagatgtcagcaacaatttgacgtttgtccttctgcaaacgtcatgaacgatatattctggcaaaaaagtatccaataaaagataaaaattgccgctatatagaacagacaaaatattcacaactgtgtcagccgaattacttgcactaattccaatacagtttccctttccagcaacatgctgtcttattgctaacgctctcctccctgccattttatgaagttctgcaaaagttatggaattatgttcatcacaaattgcaattttatctccgaagtcttcaacattgcgctccatacaacgcaaaacagagacaaagcaaaccttctctttttgttctacgccatcatccattttcaattcctccttccatcagtgattttatcctggcataataaagatctaaatctacttttctgttatccattgagccataatcatacctctccataaatgcatttctacactgacattctatcatacacaactgcttcacaatatcttctctcactttcccttttgttgcagcggagtattttgatagttgccgataaacgatccaccggcaatccggacaaaatgccggcggaatcattggattctcataagaaagattattctgctctctttcctcataccatgcaatattaatacattccaattcttctgccgcaaaagaattcagcaccataatgagttcccagccatttacgggtttatacagcccattcctggcaagaaagctaatcaacgtatattctttcaaattaattggaaataccacacatgtatctactcccgcctctagtgcatctttaacagagcaaatgcagtcatctattctagctgatacacttaaaaacggcacaccaagaagaatattcgcacagcaccccatcccgtatttgtgtaccaactgaatgatgtctttcaatttctccatgcttactttcttattcaacgaatattttaaaatctgcgtattgctactctccaatcctatctctattacaagatacgcatgaattattttttttaataaatttaaccgacattcatctaccgtattcatatgcgtttcaataataacgatttgaaaccccatctgttcaatagccttccatatacgctcctgttcttccaataaaagctccttgtaatcaaacggactaccacatgtattaaaaattagtgtcgcatattgtcccttatacggactcaatgcttttttcactatctcatccggatgctctaaacgattgccaatccaatagtcacaaacagaacaacttcccacttttgaaaaagaacatccaaccgttcgaatccacagttgtatcacagaagtttcttcatttaccataatcgtaaactcctggctgtcttttacatacggacgttttgtacgtagttttaatatagtttgcgctagaaaggcattatcatctccggaaattccatacttttgctcaaatccatcatgcagattgaaatactctgtcatacacatatccatttatcacaccacttaaaccatcagctatttatatatattttatatttatacttaggccctgtcaatctagagatccttaagtttccactttttctacagaactattttttatttttattactttggcacaattttcacaagcattacagatattactgttcataagtgccgaatatttcggtctttggcagcgatctgattctcatttgagcatgaaactcctccacaatttaggaggcgatgttcaactactaaacagcctattcgattagtgtttttcacaaaaatctctatcagatttatgaatacagcacaaattttactacttttattcagatgattctcgccacaccggactggcggctccgccgcaccataatattcatcagataaaaattatagtctttttgcttatactattttaataattctcatagtccatgtgctaaatttagcaaatgcacttcttccttttttaaatgtaaaatttattgcacacaatacaataattagtaaagaagcttcacccactactgcattagctcataccaaacggtattgccacgtcttacacagtgtccacaagctagaacctccagaacgcaaatcagccgccagatctcccatgtatctctggcggctgatattttaagtttataaagaaattcttccgtccttctatgcctcttcccaaaagctcttcatacagtccacctgtacgaaatcaagaactgcatccttataaggcgtctgtacccagcactgggtctgctcccattggggatatacattgcttgtaatacaatacctgcccccattcacataaatctccacactgcttttgtccaccaggatgcacagctcccatttctctccttttggcttcaccgggcagttcatccttcccccttcatacagatcactggcatccttgtcaagggtgatcacctttcccaccagatccagggaaattcttgtaaaccgttctccttttccaaggacacagatctccacatatctggaggagattttcttttcatccagagagatcagcagccggtatctgcggttttcccccacgggaagatacttcttctgggtgcctgcctccagattgtgatacagcacagacttttccacaagattttccagctcctccactggatagaggcacaggttccagtcctcatccagacaggcccttcgggggatgctgcaggcgcccctccagttttccacgcttgtgggcccccagtccctgcaccagggcatccacagccagccattctgccaggcaatgagcacccggtttccatgggcatccacaaatgactgaggggcatagtaatcaaaccccacatccatattgccaatcttctccaccgtatatctgcaggtttcaaaatccatggtccccacacagtacagggccttattgtaacccggatgattcatgggggaacaggtgacgatccacttcccctgaagataaaacatatccggacattcaaacatggttcccagcctgcctttggattccaggaccgtgcctttataagtccagtggaaaaggtccttagactggtacaggaaaatccttccgtctcctttttgctctgcccctcccacagaaccgcccacaaccatataccattgctccttctccttaaataccttgggatctctgaaatcctgggaggtgccgggaggaggcccggggatcaccggattcccctcatatttttcaaaatggatcccatcttttgaggaggccatacactggctttggtaaactcttccgccttccttcaccgtggcactgtaaaacaagtacaaaatcccgtccttctccacagcgctcccggaaaaacagccgccctccggatggttgtcataggactggtctggtgtaagggcaatgggcatatccttccagtggatcatatctgtgctcaccgcatggccccagtgcatggaatcccaattgcagtgcttggggttgtattgatagaacaaatggtaccatcccttataatagatcagcccgttgggatcattcatccatgccttgggaggggtaaaatgataccccggccgccacagccctcctgtgtcagagcgctcctgcatggctgcaaaatattcattcgtcatactcatttacctttatgccgtccagatttccatagatcaccttcacctcactgtgcctctctcccttctcatcaatggtctgatgataggtaccccaggcctttccgttaatccagaaggtggtgtagtccttctcattgatcactggctgaaaggacatggtcttcttcaccatatcgcattcatagcctgcgaactgagggatcagcgaaaagctggacattggccggatatagtggtgccctgcctcggtctcgctccaggggcagcgcttatagccgtcatatctgtcccggatggctttgataatggtgagcgcctcctctatcattccctcttttaccatggtgaccgccacctgatattccacccctgtccaaacctcatcacagtaggcgaaggggaatctgggccttcctccctttggccaggaacacagaaccagcccagcctcatcgtttaaggcataggttcgctggacatttggcacatcctccatacattccttaaaattatacttataaatagactccagggtcttcttcacatgctccttgggaagcacatacccaagacctgccgtctcagccataaactggcccaggagctggtctgtaaggcagccctttccatactgatagcggtaggcatccacatcctccagatcctggatataatactctccgttaaacagcctctggtcaacctggtctgcggccttttcataaagggctctgtactttttggccgtctcctcttttcccagatgctctgccatctgggccacgcccttcactgctcccagatagatggtgtttgtcatggtattgggaccatagaattctatgtcataggtcacatgctgttttccatccagaaccccatccttgtctgtatcccactcatgaatggaatattccaaagccttgatcatgttgtcccagatccctcttaagaattcatcatcacctgtatatttccactcccggtaaatccgcaggatcgagccaaattccccgtcacaggcagggatcatgtcccaccggctctcacctaagcactttctggcacggaagggcatgcagccatcctcatccagctccaggttaaattccacatttctcatggtgatctccagctctggaaacagcccggcaactgctgtggcatagttccaaacatggtttacatttccctggccgcagcccacataatcccggattccttcccagcccaggaagttcccgttctctatgcggaagcagcagtggcttttcatggacataatgttggcggcaaccgcatcgatcacataggccggaagagaggtgccatgcagggcatcctcaaaggcatgggacatcccctccaggtattccttcttcttggtcacataggcgctcacatcccaggcgtctgtaaatttcgtggcgtaataatttctgatggtatcatagccgccctgggcataccgtttcaaatcctcatcatactcgatccacccctttggacggttgggaaaataccaggagatcaggaattcaaacaccttctcctcattggggccgatggtttcctggctacacacagagctgatcctctccttcaggttcaggaagctgaaatcataatgggacagcagatcacagccctttgcctcaatctcctcttcctcctccagacatccgtctgctgaaaaatcatcccagaaatcctgggcattgtctgtccactggccgtggagccattttttcttggaaatcccgctggtattggtggtggcaatggacatggagccaaacttcatatccgtctccttcagattcttcgctgtgtagtaccagcccttcagtccatcctgttctctgtactcgttgcacacctcatctaccagcttcacattattaaacacatcatatccgtcaaagcccaccacattggccatggttcccaccacagacacctggattggcttgttggtgggattggtcacccggtatttgacaatggctgacggaattcctgaattgtccgcatccagaggaatgaagggcgtgtacgcctccatgcgcaccttcactgggatctggctgtcctttaaatccacatagacaaagggctgttttcctaccatggaagaatcctcaaatctggggatccctgccaattctccgtttaaaaagccatgggatttatagtagggcgggcggatctttgattccaggatcttgctcactgggtccttcccctcttccttggtccaaatggcaaagaaggaaaatggcacaaactgtcctttccccggccagttgaaaatctcccagtccctcagctctcctctggctcccacggagatatttccggttcccagacctcccaacagaaattttgccacagatgcatcccctttgtaggagatctctcctcctgtctgaaaaagatccgctttcgaatgtaattgttttgtgttcatatgtttgcctcctgcgcttatgctttcttctatttatcctttcacacccacatgggtcatgcttttcacgatccacttctgccccacaataaataccaatagtacaggcaggattgacaacaccacagccgcgaattccacattgtctcccgttgcatagggctgccggatagacaggatccccacaggaagagtcagctttggagtgtcattgatcataataaatgtggtgaaataatcattccacgaaaacgtaaatacaataatggccagggaagccagggtggactttgccatgggcagcataatggaaaagaaggtgcggatgggtcctgccccgtcaatggccgccgcctcattcatatcccttggcactcccaggaaaaactgccgcatcataaaaatcccaaaggctcccgccaggccaggacacatggccccgaacacagagggcagggtcactgcccaggaagtatttactacacctaaaaaattcatgattttatataaggctacaatggtcacctgcacaggcaccatcatggccaccatcatcatgccgaacatgagattcttgccccggaaatgaaactttgcgtaggcatatcctgccaaagccccgtgggacaccattcccagggtgatcactgtgctcatcttcaaactgtttttcataaaattgaaaaatggaatggagtcagagaacagcttttgataatatttcacccgccactgggaaaaggccggaggaagccattttggcggaagtgccgtggcttcactgtagggccttaaggatgcagagaagacccacagaaatggagcgatgatcaaaaaggccgccataagcatgatcaccgtgagcacaatatggctcaccttaatctttttcccaaatatcacaagcttcctattcataatgcacccaccacctgcttcctgcaaactgcagcagcgtcaccactgcgatcaatcccaacaaaaggatggacagtgcggacgccccgccatagtcaaaggaggtaaagcccttttctgcaatgagcatcaccagacttctggaggaatctcccggccctccgtttgtaagtacatagatggattcatagatcctcagggctccggtcacattcatgatcagcacaaagaaaatctgcggagatgccaccggtatgacaatccgccaaaagcgggaaaaggcattggccccgtcaatgctggccgcctctataagtcccttgtccacattctgcagtccggccagaataagcagcatggacatccctgagtttttccacacatctaagatccacaccgagattttggaaaactcctggttgctcagccagcccaccttggagattccaagctgtcccaggtaataattgatcacacctgcatctgtctggaaaaaagcctgccagataatggccacaaaggtgagccccaccagggaggggaagaaataaacggaacggaaaaatacatttgcctttttaggaagaatgtcatccacaaggaccgccagcaccagaccaagcgctgtatttcccagggcacagcagatggtgtaccacaaggtgtttttcagcgtggccatagaccggggatccgtgagtatctttttataattttccagcccatgaaaggaagaggcgccggtaaaaacgttatatttctggaaagagatgatcactacccaaacaatggggatcaacacaaatgccagaaatccaataaaggaaggaagggtaaaaagataggcggcaaaggtttcttttttgttatacttttgtctgattttcgtttttctttgcattctcatctacctcaatgggtgtccggccgccaggtcaaaccggccgccggacttcctatgctattgaacagcagcttctacctgggcctgggcgtcatccatggcctgcttggcctccttggctccggagaacacctcctccagggctctgagcattgtctgctccagatcaccaaagtaggtgggcgctgccaccggtgccgcgatggtgatggctttccacagtcctagaatgttgtcgggaaccgtacccatgatcgccgtatcggttgccagtgcctgggtgggaggaatctgctggcctcctgccgctacctctgtgagggtttcactggaaaccatctccttcaaaagggcggctgcaagcgcttgatcctttgttcctgcaccaatgcaccaggcagagccgccgtacacggagccctccttcttatttaccggccactgtacacagtcgaaatcatccttggtaagtccagaatcctgccaggtgttcagcacccagcgtccggcgcccaccattgccagtttcttggaagaaaacatggtgtacacatcagagctgatgggatccggggtaacgccttcctttaccatattgttgagaaattccaccgtctccaccatagcctcactattgagagtgggggtgcttccgtcctcccctaccgggtaggcagcattggtcacccaccagggagtgagctggaaataggagctggacaggccaaagccatagacctcctctgtggtgagggctctggccgcctccataaactcctcccaggtccacccatcctgagggaattcaaggccggcttcctggaacatggccttattataatacaccaccatggtctgggtgccgctgggcataccatacagggtatcctctgcactgaagccttccagaagggatggggcatacgcctctttcacagccgacaggtcctcatccttttcgatcatgtcatccaggggaaggagcagttcattggccactgccatctgagcggcctccaggcctaagttgatcacatccggtgcctcccctgaggtggacatggtgatccatttctgaataaagtcagaccaggactccactggcacacaggtctgctccacctttacattgggatatttttcgttaaaacgggcaatggcctcatttgcaatcctctcctcctctgtgttcccccagttcagcacccgcagacttccctcctggtcgtctgcccatacggtacctgtaaaaaccgtcccggataaaaccagagacactgctaatcccatggctgctgcctttttcatgttatttttcataagaatatacctccatcctttccatttgtggaacccgttccacatgcggtatttttaaagaattcccacattggaaatcctttaaatttgtaatcaccagtttatattataaattgcctatactttttgtagaattatgcacatatttctaacttgtttttattatacacaagcatttacggaatgtcaatatgctttttaaaattttatatatgtggaatccgtttcatcttgcttatttttgtgcatattgccagtattatccatgaatccttttataaagctctgtggtccctccctggtgcacggatacatccaaaatcatcttttgctggcgcactggcttcccatctaccatatcacagatggtgcccaccagcttttgggcaatgaccggaattggctggacaatggaggtaatgctgggtgtgacagagtctaccacataggtgccgtcataggcaacgatctttagatcctccggaacccggatattttttttctgggccgccttcatataatagaggaccagaaggtctgtgccgaatacgccgtccacgtccggatactccttaagcacctgttctgtgatcctttcaaaatagctggcctcaaacttattccatcccagctcaatggagatcaccgggatcccgctggcatccatcatcctctgaaaggcagtatgtctggcatccgagggagagttcactgccttggccccctgaaactgcagcacttttttgcagccgctgtgtatgagcagctccgccgccatccttccgcctttttcatggtccacccggaccacggggatatcctcccccaggtttctgtcaaaggccacgatgggcttttttatcttcagataggactggatttccagggaatgaacccctgtgataatgccgtccacaatatgccggtccagcatatccagatattcctgctcgctgtttttttctttaaaggtgttgcagagcatggttttgtagccgttctcgtagagcagagcctccacatccttcaccagctccgcaaaaaaaggatgggatacatccggcatgagcacagcgataatgcccgcctttttgcggaacagctgcctggcaagctcattgggcttgtagtccaattcctctatggcattcatgatctttctccgtgtgtcctcggaaacgtagccgctttcgtttaacacccttgatacagtggccacgcccacccccgcaagcctggccacatccttcatacttgccattttgttcctccttctgggttatggagatcactatcatctcgtaagactaaaaatccaggggtcttcttattttcaaaaaggcctctggatttgtgtcgtcttttggcagaaacagaagccctgctcctgcctgcactttctttatcttggcattacggtatctgccaaagccacatattcattcgtaatttcatggaagctgccattgtcagctttggcagcaaattccatgtcaatgggcattttgcctaagaccggaacattcagctcctgggcgatctcatcaatgtggctctcgccgaagaccttgatctcactgccgcagtccggacatctcacatagctgtaattttctaccagtcccagaaccggcaccttcatcatctctgccatgttgtatgccttcttcacgatcatctgcaccagatcctggggagaggatacgatcactactccgtccagaggaagagactggaatgcggtgaggggaacatctcctgttcccggaggcatgtccacaaacagatagtccagatcggtccagatcacgtcggtccagaactgttttaccatattggccaggatcggtcctctccagatcaccggtgtctcctctgtgggaagcatgaggttcacagacatgaccttaatatcattctgggtatgcataggatagatgccgttctcatctgccttggctgccccttttaatccatacattttaggaatggacgggccggtaatgtccgcgtccaggatcccaacccggaatccctttgctgccatgcggtttgccagggatgcggtcacaaaggattttcccacaccgccttttccgctgatcacgccgatgacatgctgaatatctgaaaaagcattcataggctcctgaaaactttttgggtcgttcttgtgttcacagccttcacagcttgatttgtcacaagttttgctgttgcattcttttgccatttcccttactccttctactttcatattccgctatttcataaagcggtcaatcgctttttccagctctctgagagcttctttatctccgtgctccaccgcatccacaatacagtgttcaatatgatcctgcaggatgatcttgcctgtattgttgatggcggacttcaccgcagataattgtatgaggacctcgctgcagtctcttccgctttccaccatgcgcttgatggattccatatgtccaatggcccgggaaagccggttcagcactgccttggtgtgctcgtggctgtgggcatgtccgtgtccatgctcgtaatcatggctatgctccacaatggtgccatcctcaagcacatgccgatgaacgtgcatatctttgtttgtatcgtccatggttccctccttctgtatagtataacgctgtcccttccctctgtccagccatcagttagatttctgaaaaggaaagcctttgttttatcaaagacgtgaccacatcgaagacaatggttccgtctgcaagtatggtcttgtcgtaggtgacatcctttccctcgaactttttcttcacatattcttcagggtctgtaagggatacttcctccacaaacacatcccgcatttgatttctgggacatttattaaaaatttcccagatcacttcatactccttcattttatcctccttccggaaaatcataccttgtgccatgcataccattccaggcgtctttcccccatggccccaaaggcaccatttccagtataaattttttcggggattttgtcaaaaaaagaattgtattttcttatattctatcgtattatggttattaaatcaaaaatacaacaatctgtcactgttcaggaaaacgaacagaaacaacaatcttaattcggataaggagatcaatatgcagcttttaaaagaccgtattctcaaagatggaaccgtgaaaccgggcaatattttaaaagtggacagctttctgaatcatcaaatggatattccttttatcaacgagctcggcaaagaattccgtgcccgctttgctgaccgccccattacgaaaatcctcaccatcgaggcctccggaatcggaatcgcctgtatcaccgcccagtattttgatgtgcccgtggtttttgccaagaaggcacagagcctgaacctggacggtgaaatgtactgcaccaaggtggaatcttatacccacaagaaggtttatgatgtgatcatgtccaagaaatttctgggcccccaggaccatgtgctgatcatcgatgattttctcgccaatggctgcgcccttctgggtctcattgacattgtgagaaaatccggagccaccctggagggagccggcattgtcattgagaaaggcttccaggaaggcggacagaagatccgggatatgggggttcatctggaatccctggccatcattgattccatgacagacgacagtctcactttccgaagctgatacgctgtatgtaaatgcaggcaggatgatcctgcctgcatttttttattacataggaaagttcttagaactttcctatgtaataaaaaccctccgggggatgcacacaatgtgcaccataagcacctcttactcctctttttgtccgccgtcttctatccccagctcttcctctgtgtacacaccgccctccacaagaatctccacataattctcccggttcacggttctcacctcacacagactggagggaaccaccttcaccccattgtcatactgctctgtctcattctcaatctcttcctgttccaccagggcctgggccgtcttggcgctgatccctgccaactcccggtcattgccgtaggtgctggcagcctggaccttatccttgatgcccacagctccctccagcgtaatatctcttccggtgatcaggggccagaggacctcctggacttcctcctgaagctcctgagccttctggtcctcctgagccttctggtccttcccgtcatcctgatccttctcgttctcctggttcttcacattctcctgatccttggaagattccgcctcctgtgcaccgtccttctcagtgatcacaacgggcttcatatacttctctttatcaaccgccctggctgctgcctgggcaaaaaggtcggacactgtacagataacatcaggggctttctgaggataatatttttccagaatctccgtgagcttctcccctgcctccttttctccgtccacactgacggtgtccagagtaatccttccggactcacacaccagcgttccatcctccaggtagggtaccagcacctccatcaggcctgtataaaacaatagggaggtggtatcctcccgggggcccataagaaactcaatgctttttgtaccctcttcttttttcacagattcaaggtcttccttttccaggataaattccccgatctgccggccggcggccagataatcataggtcaccagacagtccacagccccactgttctgaataagctcaacataggacagtaccgggatctccttctgttccgcctcttccagaacctgtgtcaaatccgccgattcctccggccggatcacaaggatatccacatcctgggaaagccagttttccacatccctctcctgggcctctgcatccttcccggaaaatttcaggtccactaaaaagccaagggcctccagctcctcttttaaaaaaagtgcctggttcttctgccttgtgtcgttttcatcaggtatggaaacagcggccagtttttcttcctgaccatcttcctcttcctgtgcggcatcttcctccccggcctcctcgtcttcctctctggccattctcagctccacttcatctgcatcctcatcctgggcctggggatctgcccatacccctgagggcatcccacaagatgcagccaaaactgcacagagcagggctgctgtttttttattcatagaactcctccttgtgctcacaggcccttatattctttcgctatggattttaaataatctctgtaggcagctgcctctttcctgggctttgcgatctgcacgctttttcccatagaggtgagccagccatagaatctggggccgggaaccacaggcacattgatggaggccaggccctggctcttttccttccaggaggtgtcctctccaaaatatttcagtacagcctttctgctgtcctgacggcacagaagcttcagcatctttttctctccctggtcttcctcccgctgcgatccggggtctgccttctgtctgcgggaagctgtcacgcttcctgcccgtacctctgggctgggaggaacgggtgcggtgaagccggactctcccggtttcttctctgccgtatttccaaccagataataaccgctgggacgctccttccggaaccggatctccattccaaactggcgcagagtctccagatcatcataaatgctctttctctctgcacggattcctctctgggcaagcagctccaaaattttctgcatggatatcacattatcctcatctgtactttcctggaaaagctgcagcagatataaaattttaatcttctgattacaagatttcgccatattatcctccctgtctcgtctcctagtattgtgcgccaatgtgtagctgcgaagcagcttttttgcatctcccccggagggttttcattccattgggaaaattcagaaaactttcccaatggaatgaaaaaagatgccgaaaacacatctgcttccggcatctctataagttcttattcttccacctcaaattcgtccttgccaacgccgcagatgggacacacccaatcttccggtaaatcttcaaatgcggttcctggagcaattccgttatcgggatctcccacttccgggtcatattcatatccgcagggaacacaaacatattttgccatgataactcctcctttcttcccattttaagcagacaaagctgtctgcctctgatctcttaagcacattctgctcatttgccgcctcttttataccagagaaggcttctatcaaacagccgtgcaggaatccataccatttttgtatgatttcgtaaacctattatacttcatccgtgaataaaatgcaacaacgaattgccggatttttcgtcacttgctttcattctttacgaatctgtgatatacataggcatttgcctggttttcttctgcatcctccaaaggatagagggtgatctctttgccatatttctgttccagcgccctggcgatcagccagtctgccacctgaggatttttcggaagaagagggccatggaggtatgtgccaatcacatttttgtacacggctccctcaaagccgcttttcccgtcattgccgtttccgtaaatgacttttcccaggggagtaacgccagaacccaggatagttcttcctccatggttctcaaaaccaaccactggcatctgaaaaagaggactctccaggacaatattgctgatcagacgcccctgtccctgttctgtataaagatctaccagacttaagccagtgatcattccctcatcggtcttataatagtttccgatgagctgataccccccgcagatggcgatgaccactccgcccttctccacataagtcttaaaggctggctggatctcccgcagcttctcgcacacaagcatctgctccctgtctgagcctcctcccagaaggacaatgtcaagctggtcaaagtcaatggtatcccccagctcaaaggcagtggtctctgcctcaatgcctctccactggcatcttctcataagacactgaatatttccccggtctccatagagattcagcagatccgggtataaatgtccgatagtcagcttcatacgtttctttccccctggattttcttaagaatggttctggtactgtacagagccgtatagttcaccaaaacatacagatttcctgtatgtcctgtaagtctgcttcgaatggccttctccacatctgcctccagttcagaggaaatatccacatatttcaggcgcagcctcatgtcctgacagcggatcccgctgaccacaatggactctacgctttcatcccccaggcggtcaaaatccacatcccaaagccaggagatgtcaattccatcctgggcattgtcgttaatggcgatcaccaggtccttgggagacggatcctgcataaccgcagagatgttctggttgaagcctgccggattcttggccagattcagcaccacactggtgctgcctatgcggaactgctccattcgtccgttctccgggttaaattttctaagcatctcattaaaatgctctcctgcaaagccagcggcccgaagtcccgcataggctgccagaatattataaacattgtaaaagcccttgtaatttgcggtgatatgccgtccctccacatagaaggaaagctgctctcccacctccacatcctctgcatcataatccagcctgggacgtttgaagccacagtccgggcattcataatcaccaagctggctgtaatggtagaaccgataattcattttggccccacaccgcttgcagaagcgcccctcccggatttcattggtgtcgttctccatgacctggcggctgatgccgtaggtgaggtatttgtttcctgcctccatggccagataggctgaaagtgcatcgtctccattgacgatcaccttcatcttgggcaccttttggatcatctccttgagaatattcatagtgatgtcaatctctccataacggtccagctggtcccggaacaggttggtgagcaccatataattgggtccgagcttaggaaacacatggcgggtggaagcctcatccacctcaatgcaggcaaagtccgcatcaatgcgtccattcatccctgcagccagcacaaaggcagacaccaccccattgagcatattggagcctgtgtgattgcatatcacctttttcccctctgcttccagggccgcacacagcatattgttggttgtggtcttcccgttggtgccgcacaccacaaaaatcttctcccgcacctggctggaaagatcctggagaatcttggggtccacccgcagggcgatctttcccgcccaggtaactccctgtcttcccatctttttgcaggcccatccggcgcccttggctgcccacacagctagtaatcttctaatcctcatagtctctgtcctttattatggtcttttccttaggtaaaacaaattttatagatagtataccctcttttccctgaattgaaaagagaatcttcgactttcttcttcatttcaaacaggtgtcccgcctggacggagtccttttacctggccgtatgcctcacatagacaaaatcctgtcccaaataacagtcatcgccccatttctccttgaagcactgggaaagctcctgccatttttcctgggagggcagcccttccagtccatcttcaatgagagttctgggcattcccatcagaaagcttctgctggcggcatttttgtcctgttcctccagaaaatagggcagttccaccctgcattccacaaaatccacacccagatatctggtatcctccatctcctcccggttataaaattccaaaaaaagctgccgcaccggggtataataggccttcaaaaactcctccctggaaaaatggatctgagccttttccttgtcctcctgtattttctgtgcgccctggagcctggcggtcaaaaaccctttttcataaaagctcatgcacaccgcagcccactgtgggggcatgtcattcaccgcctccagctctcctgcctgaagagccccttctctcaaggcctccacactgttgttgctgcggcccttggaaacccacagggaataggcctgggtctgcctgttccagcccgccatctccgtgcgccttttgccgttggcatagagcaggggcatcccatcctccccctggatcaggtggagatggaccaggtaggtgatgtcaaagagacgctgtgcgatcagctttgtaaaaatcaatcctaaataataagaaatcgcacttttctctgtggaatccagaaaggaaatggaagaagactttcccagatattcttccttttccgtcagcccggtctccagcagagcacatttctcatagagctgccctctgcgcttcctggtataggcaggcagaaggcggctggcgggaaaggtgcaggtcactgcctggtggagcagctccagggtggtaaattccatgatcgtgtccttagacaaaaaattttcaagactgcttcccatggtctccacagccagtttaaatgtcctgtttccagtgagcagcatccgttatcctcctttgtatcccattatttataaaatccttgcctcatttgtttttgtggtatcctctattttaccttatttttccccttatttccagaaccaccttaatttttcttgccctggataataagtctttccgttcactggtgctcttttgtgccatgggcacccataagcagccagacctttggaagggcagaaggtgtgcaggcagggtttccatattctgcagcattctgcaggataaaaactggctgcaaaattctttattgactttaatttccgaaatcagttactataagattatataccagtctgtccggcctcttaaaaaccggctggcagaaatagaaaagaggaatgattatggaacacaccgctgccttaggggagaacccccttggctctgctcctgtgggaaaactgctgagaaaatttgccattcccagcattatcagtatgacagtgagcgcattgtacaatattgtagatcagatttttattggtcagggcgtagggatgctgggaaacgctgccaccaatgtggcatttcctctcaccacagtgactgtggccatctcccttctattagggatcggcggagccgccaactttaacctgtcccttggccgaaaacagacagaccgggccaggggcgtggcaggaacggccctgggtgccctgcttgtgtgcggcatcctgttctgcctggtcagccgctgttttctaaagcccattgtgctggcctgcggagccacggaccagaccctgccctatgccctttcctatgtggggatcacctctctgggttttcctttttatatgctggtgaccggaggcagccacttgatccggtcagacggaagtcccacgtattctatgatctccatgctttccggagcagtgatcaatacgatcctggaccccttgtttatctttggcttcggctggggcattcagggcgctgcctgggccacggttactggacagatcttctctgcctgcatggtatttttctacctgccccggtataaatctgtccatttgaagatgaaggactttcttccaaaggggaactatgtaaaagccatcttatctctgggagctgctgcgtgcttcaaccagcttgccattacagtagtccagatcgttatgaacaataccctgcgtcattatggctctctgtccgtgtacggaagtgacattcccctggcagttgtggggatcgtggccaaggtaaacatgctgtttctgtctgtggtcatcgggatcgcccagggcgcccagcccattgtgggctttaattacggcgctgaaaaatatgaccgggtgaaggagacctataagctggctgcggggatcgcctccgtgatcgccgtagctgccttcctgtgcttccagatttttccccggcagatcacaagcctttttggaaacggtgaccctctgtattatcagtttgctgtctcctacttccggatctttatgctgtgtacctttttcaatggacttcagcctgtgaccgccaactttttcacctccatcggaaaagccaccaaaggtattttcctgtccatgaccaggcagatcatcttcttgatccctctggtgataatctttccaatgtttctgggcattgacggcgtcctatacgcaggtcccattgcagacggggcggcagggatcctggctgtccttctggtgagacaggagtttcggaaaatgcccgcccaggcgccggctaagaatcaattacagtcgtgagaatccacagccaaacgaggggcttggcagctttgtgcgccattatgcagctgcgaaacagctttctctggcaaccaaaaaacggataaaagaagcggctcaagcggctgcttcttttatccgttttctcttactctaagggccttcccgccctatttctgcttctttatcatctccacgatctcctgaaatttccctgtgatcagctggtagttttcccgcttgtggggaaccatacacccgctgcagtccttaatgcctttttccgtaaaagaaaaattcccgccgcacttgtcccccaatgcatacaagggacaatagcagaacagacagttaaaattatccggatcctttgttttatgacatggaaaaaattcacatttcttatgagaaaagaaggtataatttccgttttcactttgttgtttatgagccattattttctcctaacgaaaaagagacagcgatgctaccttggaaaaatctgaaacaaaaccgttcatgagtgcgcggagggaacggattccaaagtagtatcgcctgccatttaatcaggtataattcttaatgaacaggcgcatcccatggggaccgcatttggcagacccctgtttccataaaaaaatgcctgcttctgaaagcagacaacatctgaggctgcggaattcctcaaactggttgtaaactttgcacggaagcttaacctcgccataaaaagcaggtttcctgacttcaggatcatcgttcagctctcccttctcataccataggtacaatgggctgacagaacctcactcctctgttacagtgaccggatcgctcaggactttcacctgattcccttttataaccactgccacaatcagcagttatcactttctatgtttcatatggaattatactgcttgtatggtagcatttttttgatggcctgtcaatatgccctgaaattttttcgccctgccgcccttgtccattgacaaaacacggcagggtgaattcctgcttacaacacttctccattggtccggatcacattctgataccaatagaaggagtccttttttatacgctcctgagtggtataatctacaaaaataagaccaaaccggtcagaataacccttcgcccactcaaagttatccatcagcgaccattggaaatacccccttacatccactccctcctggcaggccttcttaatctgtgacagatatctggccagaaaatcaatccggttgggatcatgaacctttccgtccaaagaaaccacatctggacaggacagaccgttttccgtgatataaatgggtgtccggtatctttcataaagaaacttcgggccccaatataagcattctggcgtaatgggccatttcatagcagtcacgggaaagccatcgctgcgcttcaccacctcaggtctgccgtcctcccctctgcggatgcagtgtccattataaatattctgtccataaaaatccaacggctgatggatcagcttcatatcctcctgtgtgatcttaggcagatacttctcaaaatattccagaccatcctcagggtagtttccaagaattaccggatcgctccaccatgccacattccacagatccggagtgcggctgtcaaagagggcctccctggctgcctgaatatcttccggggtatctgtctggggatagcacatggatgccgtaggtgcatagcccaccagaacaggtcccctggcgttggcccgaagctcctgtacagctcttccatgggcttttaaaatattgtgggacatctgaagaatatctgttttgggattatgcagacccggcgcatgttcccctgtgatatgccccagtcccaggaaacactggggttcattcaaggtaaaaaagtattttactctgtctgaaaaccgtctggctgccaatgcggcatattccccgaaccaatccacacatttctcattcatccagccgccctgcttatacagctcgtaaggaagctcccagtgatacagggtgatataaggttcaatccctgcatccagcagagcatcaatgagttggttataaaattccacccccttttcattcactgtgcccactccattgggcaggatcctggcccagttaatggaaaaccgataggccttcagccccatctccttcataagggctacatcctctttataccggtgataatggtcacaggccacatctcctgtgtgcccctcatagatcttaccagggtcccgcacatacacatcccagatattcaatcccttaccatcttcaaaggctgctccttccacctgataggaagatgtggcggccccccatataaaattctccttaaaactcacagcatgtcctcctgatccataagtatagggtttccgtacccaaccgccagttgggacttcatcctgtcgttgtttcctcttattcataggtatcatacaagctcagcactcgtacatcctctttgataccgcccgtccagccgtccagtacctgtatccgttctttttccagtgtatataccagtccctgtgtatctgtaagagattcaaaattctgagacagtctgccatcatgatgtacaaaatccaaattcacaaagggcgcaaaggatttccctgtaatatgaaactcataccggtcctcccgctcctgcacatccaccaaaagctgaggctccttaagcctgagatacttataaggtacaaatgtctccgtctctgtcaaacagctcacccgcccctcctgttcaaaggtaaaggtacacttggcaaatacagaatcctcttttgcagccaccatgggaaaatccttttcccccagcttccaggagcttaaggccgggatcttgtcttcgaaagagatctcctccagcactttgaaatccatgctcttaatctgaagaaccgccctggccctgcagggagcaagtgtttcattggccgcccatacctgaagggtcttaccatttctgcagaggcttcctgccagcggcgcataaaattttgccgccatgtagtgaagggccttatatctcccatagtagtccacactggaccagcttgccacaggccagttatcattgaactgccagtaaatacttcccatgcatctgccccggtttcttctccaatgttccactccggtcttcatggccatcccctgaagaatctggctcacatacacaagcccctccagatttttgggatagcggaaggtctcagagagataatacagaattttcccgtttgcctcaggatttttttgatgactttccataaccctggaaaaaatattccggtcttctttttccgtaaaactttcaatggttttcatggacggaaaggactgaaagccaaattccgaacaaaaacggaaataatggcggcggtaatcctcaaaaggttcccccccatgccacactttccaatagtgggcatctcccctgtcctcactgtccggatcatcgaagcttcctccgctgctgggagaggagggccagtaaaaggtctgtgggtccctctctttcagagcctttggaagaagatattcaaactgcagaagataatcccttttcagacacaagggatggtccttcacctgttcccaggaaatccatgccgattccatttcattatttccacaccacagagccagacaggcatgatggcaaagacggcctgcaatctctttcgtctcctccagtatggattcctgaaattctggagtgagatcataaatattgcaggcatacataagatcctgccacaccaaaagtccctttttgtcacagagtacataaaattcctcggatgggtaataacccccgccccaaatgcggatacagttaaagttggcaaaaagggcatcctccagaaggcgttcctgacgttccagggtaatctgggggtatatggcatcctcaggaatatagttggctccctttgcaaatattttcacaccgtttatttgaaaagcaaattctcttccccacaaatccttttcctggctcaccgtaagtgttcgaaggccgatgggataggttttttcctccatttcctcctggccggacttgagtgtgaccttcacctcatacagcggctgctctccgtagcctgccggccaccaaaggcggggcttctccactaaaatttcaaatgtggtgctttcctccttcagcattttctcctggactgtcacctgcccttctggatccgtcagctccacctgaagaaaataatccttcgcatcctccttctgggccatgacagaaataaaaagctgaacggaatccacactgtgctcctggcggatcaccacatccgtcagccttgcccctgaccaggcctttaacaggaccggttttagaatccccagatcaggaagctgaggtccccagtcccatccaaacatggaatgggcctttcgcacatattggctgccatacatcgtgcctgtattgatcatggaaatctctctgccctgctcaggctggtacttctccacatacgccacgggtgaacggagcattacgacaagcttattttctccctgccttaaaatctccttggccgggaattcccaggtgcggtgcatattattcgtctttcctaacaaaacgccgtttaaccagatctctccaagggtatccacacaaggaaagaccaggcttacatggtcctgtgtgagaacctgttctgttatagaaaacattccctcgtattcataatccttgcgtaattcctcccggacctggtattcctcgtctctgtaatagggatgggggatttttccattttccagcagcgtctgcaaaaccgaaccgggcacacaggtatccatccactcctcctgcccggcccttctcatcttccatttcccctttatctcttcctgtgtcatgaaacctcctccaatttttttcctattcgttaccctttaacggccccggccaccatgcccttgatgatctctttgctgaacaagaaatataaaattacaatgggcgacatggtcagcagcatggctgccattattttcggataatccgaagaaaactgtcctgtaaactgagtcattgccaaaggcacggtctgcagcctctggtccttgatcaagaccagggcaaaggaaaactcgttccagcaggcaaaggtctgaataatggcaatggtggtcaggatgggcttacacaccggcatgataatggtaaagagtgttctgctaaaagaactgccgtcaatggccgcggcctcctccaatgcagtgggcacgcccttcacaaagccctccaccaaaaagatggcaatgggcagtccgaaggccacatagggaatcatcagagtataccagttatttcccaggcccgctttattgaataccacatagatgggaaccatcaaagaatgaatggggatcagcattcccataagaaacatcacatacaacaggcggtttgccttaaaactgatcctggccaaaatatatcccacaatatatcccagaaggattataaaaatcacggaaatgatcgtggtgcggaagctgttgaacatagactgaccgatatgataatccttatttgtcagaatccgcacataattatttaaggtgggattcatcggaagaccgatgatgtctttattaaacatccgcttttccttcagggaagagtaaaacatccacaccagaggaaacagacaggacagggagaaaatccacaaaagcacattcataaatacacctgtgactccttttttcactgtacctgcaggctttttcacttttctggcttctatcattttctttcctcccctttctcacgggtcagccagcccaccagtttctgagagcctccgatgatcagcagggaggtcacaaaaatcccgatggatatggcgctgccatatcccatgttctgctgggcaaaggaaacattatacccgtataaggccataaccatagaggaggttcccggaccgccgcctgtcatgacaaaaatatggtcaaaggctttcatgtttcccgcaatacataaggtgacacaaacaagaagtgtatttttaataaggggcagtacaatgtatatggctctctggaacccattggctccgtccagctccgccacctcaaaaatttcagtgtcaatggaagaaatggcagacaggataatcaccatgtaatacccaataaactgccagatcaacggaatggcaataagcagcatcaccaatttaggctcattgagccataccttggctgcatctttctttccgatcaattctaaaaaccaatttaaaatacctcttcggtaatcatagatcatggtccagataaaaccaatggatactgctgatacagtgctggggaaaaatcccagggttctgtgaagccccttgcactttacaagccgggagctgatcataagtacaaaaacaaaggcaagtccgatctgtcccaggacacaggcaagtaccaggtagagattatgtccaagggatttccagaatatgtcatcgtggataagctggatgtaattctcaatcccgataaaggatttctggggcccgcccttccattcaaacagactgtaaaagcctgctgcgatcagtggaacaaacacagaaaatatataaatagccagagggattaacaaatacagaaaaattgttctctttttcggccggattgtctgaagcattctgcttcctcctctctactaagattgcccccggcaggaacctgctgccgggggcaatccctggttttagaacttatcagaagttttcgtcatatgccttctgggcattttccgctgcttcttcaggagtgatatcaccgtttaacatggactgaaggtctgtgttgaggacttcccacacagctcctgttacaaaggagtcatagatctcacatccaggattgtcatagaaatggtagaaatcttgtgtatactggtcaaaggcactcagatcaacatcatcaaccttcaccagggaagacagtgcatagttttctgccgcatattttgcatagccctctcctgtgatctcataagccagatcaagggcagctgccagcttgtcagggtcctctgccacttttgcattaatggcaattccgtagcccataccagtgtcatgggtcttctctgatgcagaagctcctgtaggctgaggaatgacggcgaatttggtgttttctctgagctcctcatctgcagttgcgtagatataggaaatatcccagttgccgcctaaaaatgctgccgcatctccggacagataatattcacgggcctcttcgttgttcactgcattaaagtctgcattgatgatccctgactggaaggcatcctgggtaaactgcagtgcctgaacaaatgcttcatctgtaaatttcgctccgcccttttcaaataaggagtgggtccagtccggtcctgtaaaacgatctccgatcacggacagccagcaggaattggcctgccacttgccgctgtttccaaatgccagggtatctattccctgatcctggaaatattttgccgcttcctccagctcctcccaggtggccgggaattcctcgtaccctgcctctgcccacaaggcgctgtcataggcaatgatggcgcaggtgccttcagtgagtgccggcagagcccatctcttgtcccctgcctcaaagggatagaatttgtcttcgttatatttgtctgcataaggagaattggctatggcgtctgtcatatcgtaaagcagtccttgctcagaccaggatttcacgttcatgccctgtaccaggaatacatccggcagatcatcggctgctgataaagtagcaatttttgacttgtattcatcattggccagaactgtctgaaccaatgtgatatctggatgtgcctcatcccatttagccagtgaggatctcattgtatccgaaccgccattgccctcagcctcctcagaagttgagaaatgcatgatctccagttcccctttgtaagccaggtcatttacggcaatctccacattgccgtctgcatcagcaaaaacggttgctgctcctgtcattgcagaagcggtcattgcagcggtacagcaccatgccaacattttctttgaattcatcatctttttcctcctttattttttttatgatgattttgtgagttcactgattgactcgcctttgatcaagtcagatggtatcacgactttttccaaaaggactttctgcggtgtctccacacaccggatcaataagtctgctgcagtctctcctaccagctcatcgtgctggtcaactgtagtcagggtgggacttaacaatttcgcaatctcactgccgtcatatcctgcaacggaaatatcctggggaattctcagaccagccctgtggatggcacgaatgcctcccgccgccgcatagtcatcagaataaagaatacaggtgggcggtttatacagtgaaagcagctctgcagtcttctcctctgcctccttgtaatttcgatagtggatggatttcaggtaattggcgggaactccaagtccatgttcctccatcgtacaatagaagctgttcactcggttctttgtaacggaagattctccgttcatctccataaggatctcttctaaggttccctgataatcactctggtctgatatgccgccgtgaacataggcaatacgctcatgtcccttggcgatggcatattccgttagctgcttcatgccgctgatattatcggatacaatggaaacacagttatcgaaaacataatcaatggtagccaccggaattctgctgcgcaccagctccaacacctccggcatatagaaatccacacaggcgatgagcaccgcatcaacccctctgtagagggcatgttcataaaaagacatatttctctggcagccaataaaggtgatatcatatccacgcttttctgcacttactttaaatgcatccaaaactctggcaaaccgctcatgacgcaggccattattctcagcatccataaacagtacacccagattataagaacgctttgtctttaaggtcctggctgatgaattggggaaataatttaagcttcttgccacttccttcacttttctccgagtctcttctccaatatcgctgtggtcgtttaatgccttgctcaccgtagctactgacacaccacattcccgggcaacgtctttcatggatatcatttgtctcaccccttacttaatcgttttcttaagttaaagatagcatactgcactaataatttcaactcttttttgtgtttctttgtgattttgtctgtttacaacaatattagcagcaataaactatgtattatacacaattgttttagttttttgttcaattcactccgttatttttaccaggcgttgtccgatacccccttgttattcttatcacaatatggtattttcctatattttatgctaacttaatcggtttcgtaattttcctgttatgccctttcaaactgaagtctgctctccaactcctcatcccctcactcatgagggtctaggcagctttgtgcaccaatgtgcaattgtgaagcagcttactgcatctcccgtagggttttgattgcataggaaagttcagagaactttcctatgcaatcaaaaacagggacctcaaaggtccctgtttttggtgttgtaaatctatgctttttcttaaaaataggtaacgtcttattactgtctgctgacagccactggcgctcttactcttctactttatcaaagatgtaagcgtattcccattctgcatcggcatcgctctcaatatgatcctcggaatagcccagaaccagctgtccgtcttcgttcattccgatcaccttcatcagctccatatcatcgatctctttgcctgtgagtacgtcaaagaacacaccttcgtcatcgtcacggattttgaacttcacggcgcctttgaaattacattcgccctcgcccactacatccacaactgtccagtctgcccagtttgcagagcatttgtaatcatcaacatcaatgtcgtcatggtcaaagctcatagtaccctgcaggtttgtagcatctgcatggatataagcggcctcgtcaaccagcttgttctcgtcaatgctgatctcaatgtctaaaaagcaggcgttctcttctgtctcgataatcccgtcatcagcggtatacgcattggtaagcacccatttgcccacataggcttccggctctgcctcataatccagtgcaacggatacctccgcatctgctgctgatacacttgcaggaaccatcatagctgccacaagcagcactcctaaaaatcttttcttcataaattcttaactcctttcatggaatggggaggccccatggcagaggccccctgtattataatttgtttgttagcttttcttaactgaaaactttattcgtagctcagtccaaaccatgcagcatatacatttccatctgcatctttgtaagcatagcttccggatggagactgtgccagtacttcttcagcgatgtactgatccttgtcatatccaggaacatcgttaggagatacgcagatttcatacacattgccgtcaacttctgtctcgttcactgcaattacttcattacaggaaaccatggtcacaggaagcttgccggttggcttgtaagcgccggtgagtacgtccatacgtgcggaaacagaggttccgaaggaaccgatcataccatcacagtatggctccagattcgtcaggatccaaggactggtgatattgatggaagcgatcacgataccgccgtttccatgtacagtctctgcggtctctgcgatctttttcacatttactaaagtagtagcttcaaccttttcgccggtcttagttgtatcggtaggatgatttacttcatcaacctcaagtccgtcaaccaggtcgatcacgttcataaaggtattgctgttggaaacaccgccgggaaccacatccaggaatgcgatgtctgcttcttctgccttgtcaacgatggtataaccagcgccctcaaatgcttctgtccatttctcttcagcttcttcatctgcatcagatgcggtgaaggaaacaatataaaccttcttggaggtgtccgccagaggcagggaattttcatggttcttcatcaggacaacagatttctggttcatctctgttccaagagctgtgatctcatttgacagaccatcaacagttgctttgctttcttctacatccttgtaaggattctcgaactggcccatgtcaaagcaagctttcagggtatttgtgtttgcacggtccagagcctctgcctggatcagtccctgttcgttggcatcgtataaaatattccagtcaatgcctgtaaagaaatcaccgataatatcagagcctgcattgatgatggcagcagcacgctcagcatctgtcatatcttcagcaccgaactgcattcctccgtttaaaataccagagtctgtattgataaagccatcaaagcccatggtatctctcagcagagtattaagaatggtactgttataagcattgcccagaagctctgccttcagctccacaccacgatagctctgtggaacatctgcattgccataggttccttcctctgcagggcggctgtagccaggcatgattcctgccacgcctgcgtcaactgctgcctggaagccaaccagctggtatttctccagagagccttctgtctgatatactctccactgtccgatcgcattgtgtgattcaaatccattataagcagcaccgtcgccagggaagtgcttcatgatcagggcaacatcgccgtcctgggcaccgtctgtgccattctgataaccggtcaccaatgctgtggcaatacctgctgcaacctcgggaacctctgtgtatgtaccattattacggttccagcgtggatcagtgatcaggtcgatctgaggtccgtacatacggctgatgccttttgcgtcccaaatctggccgtcaacatccgcataacgctctacaagactgtaatctccatcctgggatacatcacccataacggcagcggcaacacccatgctgtcaggaattccgatcacattctggggatttgcgataatattaaatggaatcgtaggctcattctttgccacagccgcatattctgttgtcatgttcactgcattggtccacagagctccggtttcggcatccgtggtggcacgcagtacaccagtacggttttcaaaggtaaggatctcgcctgtgctgttggggcgttcggaagctgcactctcctgcatccttgcgccggcattaaatccttttgcagcgccgtcaccttcctcttcctcttttgcttcttccttttcttccagactcacattgagtgcatcctcggtcacattcatcagctggctgaaaataactttgccctcttcgtcatacacctcttccgcagacgtagccgtggggctgcacaccagctggtttaccagaagaccgatacgctgttcggaggtcagcttgggcagcagatccgctatacgatcctgagtatccagccgccagtcctcaaagggatccagttcctggttgttgttactgtccttgaagtacttgccgtcttcctggatgacaccgaccagtgtcacaccaatggtggggccgtcctcattttggtagaacactggttcaagatactctgtcggaccctgcttgccctcgtcgatggtatagggtgcggcaatgtactctgcagcagactctgcgtatgctactgaggtcattgacatggtgagtgtcagtgctgctgtcagactgacagctttcttcattttcctcatattcttcctccttttgccaatgcttcacgcatttgttatgagtataatctatcacacttttgcacaaaaaaaaaggaaccccccatggcgcaaatccgctgaatcttatcgtaaaaaaccagcactgccgtgagttgttccatttttatcgtaaaagaatgttcattttgtgaaagatgctacatatgtcgtggacaacgaaggggccaaaatccgtcaatttggacgcaaagacaccaccagccggaagatgttgttctctgcctggacagacacactgcccccatgctcctttgcgatctccatgatggaacgcaggccaaatccgtggtgtctggcttcctccttggtggtgacaggcatgccgttctggaacttcagatcctgttcaaaataattttccaccataaataccaccatatccccacacttattggccttcagagagatgaatttcttctcaggacacgccaccttgtccatgccttcaatggcattgtccatagcattcccaaacaaagagaaaatctccatatctgtgagaaaagaaaacaactgcccatcaagaatataggtaaaccggatcccatttatggagcagataatgtttttctctgtgagcaccacatccacgtctttattgccggaattgacaaccgtgttatactcgtcaatggtatctgacaggttcctaatgtactgctgaagctgacgctgtccctctgctgagcggatcatggcgatctgatgcttcaggtcatgacacttgatctgaagggacagaataccctcacggctgatctcataatactgctgcttgctgcggataaaattctgcatggtgacattttcctcctgcagtgtggctaaataactgaccatcatgagaaggataaaattcaccagacaataaagaaaagcagtcaaaaagaacagcagtcctgacttcccatcatcgaaaaactgataggtaaattccagcagcatctggcttaataaaaccactacaaacaacatatatgtccttgcgggaaaggacgccggccgctttacaaaatgccggctcacctcatagcacaccatgatcaaaaccagatatagcagataagacataacagactgaatagggctcccattggtccacgcctcatccgtccccaccggaatgccagagatcagcttcactgcatcccaagccatgcgataaactgtaagtgcaatgacactgttaaaaatagccacattccaaggtgcccggtaacagagacgatggcaggcaatgaacacaaggctcagtaccatcacatagacgctgtaccccaaggccacgcacagcttcaccgtcatccactcctccagtacatagcggatgcaccagcttaccccgcacagagctgtaaggctgagaaaaatccgcacagggaaggaccgccgcttttcttcctcccggttccataccacaagctgtatgaaaaagatcaccccggaagaaatacgccagtcgatctcccggatccaccaaaccgcttccatcatatgctttcccccagataactcacaaaccgctgttcaatctcttttctgtgggatttggatatctgtacgtgcacattgtttacaacaatataatccgtatgtatactttcaatatgccgcatattcaccagataagaccggttacactggataaaatgccggtcccccagcttttcccgaacctcagacagccggccccgtgccttataatctccctgctctgtgtgatagatcagatcatgatcatagacctccacaaaataaatacttttggaagagatacttacgatcccgtctgatgttttcagcgcaaaagtggtgtctatgtttccattgatgcgtttcaatgccttgtccagcgcccggtcaatggaaaactgatccacaggcttaatgataaagtccatggcatccacctcataaccccggatcgccatctgggccatctgggtcacaaagatcagctgcgcttccttgttgatgatccgcagaaaacgtgccgcttccatcccatccatttccttcatacgcatatccagaaatacaatattatacagttctcggctgcgaataaactctacaccatcgtgatattgatgaatgatgtaagattcttccttttccttaaagtagtgttctacatagcctgccagttccttaatctctctctcatcatcatcaacgactgcaatcagaagcatctgttccccctccttttcctcatatcctgcctcaaataaatcctgctgtgcaggattctctgcctgcggcgggacgcaccagaaacataaataaccgccggagcgatcatcccggggcaaaagcccaggatatagtcttcggcggtcattccgctgcttcccgtattcaattatagtatatatttataaattcgtaaagcaacaccgttgcaaattatttatattcctcaggtatctggtcaatggtctggtacaattccatggcttcttccagtgtttttccctgggcaaccgcagcttttctggcagcattcacggtctgaatctccttcattttctctccggtgagggaatatcccttcatggcaatgagggtggcgatccatgcagccataggcacgatacagaacagcacaatgactacccagttcataccaggagaatagggtgtctctgccacaggcagcttggaaattccaatgcaggatacagccagcgccacaactgtggtcgccagtgaggaaaccagcttatccaccaggctgaacagagtgcccataatgcccgggatatacttgccggagcggtaggtctcatagtccgagcagtctgccaccataggaatgggcatatctgcggtggagtaataggctccataacccactccgaaaaagatgataaacaaaatcgtatacagattgatggacaggccgccgtctcccataagggaaagattaaaggccggattcccttgcttccacaaaatcagcagaacaagcacacccacatacatgatcagtgcaacccgtacatacctttccagggacgccttctggccctgcttctgagaagtccggatggtcagaaggaagaagggggcggagaatacgtaaccgatcaccatcatgggcagataaagcccgtcataattgcccatcatactgccgtagatcatacacagcacagaggtattggtggcaatggccagcgccagcttacagcctgccccggctaccatcaaacgctgcatgggcttattgcttttaatgatctgtacatattctgaaattttaaccttctcagttctttcctggccgatgccgaagtacttgggctggtccttctcccagataccgatcacagccagtatggtcagtataatggaaatcacaatgcccagcggggcgatcacccggtaaaaggaagcggtatcataatcccccactctggaacggatcagtggtgcaaggaactgcatagcgcccattccaataaggcttcccacagtgttaaataaggtaaacatagggcgctggttcggatcgtttgtcaataccgtctgtccggaacgggtacaggaggtctggaaggtatatccaataacccaaataaagtacaggacaacaaacatcacataacgcagccacatcatggtttctggtatcatgggggtaagcaggtataaggccagtatgctcactgccatgattccattgccgagaaccataaatggacggaacttaccgaattttccgttggtgcggtcgatcaatgcaccaatgatgggatcggtcactgcgtcgcacagacgcatagccgtcaccatgatggtggaaaaggccatcaaaaggcccagcacaccattgccgaacagtgccacataggaaagcaccagaacaaaatacacattggtggctccgttattcagtggaaaaagtaccagctgatatgccttggcccgattcactttttcctgagcaatcttactcataacaggactcctctcatttatctttatagtttagctagaaagcaggtgatcacacccagttgcttttcttacttttcttctccttcttaagcttgtaggcaggattgggggcggacaccttcctgaaggaggcggtatctctcacctttccggccactgcctggattttgtttgtatcaaggagagaaatgcggaaaactcctgtcttgtccacatccttttccgctatgagcttaccgttctgatacagcttcacatgaggctgattggtataaacggtcaccttggtgctgttcccggtgcggtccgccatgcgcttgcccgcaatatgtacaaagggagtgctgctccagaacgccttatacaaatagaaactgtcctttttggtctttcggtcaaaggtcaccagacctttatggttcatgcctggttctcccccctggtctcttgcatcagcggcaaaatcaaacatgttccaaacatagttcgcccacatatacggatgccgtgcaaaacagcggagcatatattcatgatacttggcctgatattcctctgtctgatctccccggcggggtttctcagaatgcaggttgggcattccctcgcagccatattctgaaaagcacagggaacgcttcggatacaccaggtggaaaaagccgatccacagatcgttcaggaacagtcctggcacataccagcccagatacagattccatcccaccacatccgtaatatgggccaccttgttaaagggaccgcacatggcatagcaggctaaggtagtcaggcggtttgggtccatcttatgacatagatcattgagcacatagtggttgtccaacatgtcttttttgtctttggtagaaatggtgatctcgttggacactccccagcatacaatgcatgcatggtgataattctgggtgatcagctctttcatctgggaaatggtattctcacgtccctttggcagatgttcggaaatgtatgggatctctgcccacaccaccatgcccagctcatcacaccggtcatagaaatactggctgtgctggtaatgggccagacggatggaattcactcccatctcacagatcagggccaggtcctcgtcatgctctttattggtcagggcatttcccagggctcttctgtcctgatgccgggacactccatggaggggatagcagcgcccgttgaggaaaaagcccttgtccttatccacgtggaaggagcgcacgccaaaacgcagagtcacttcgtccagaacctctccctcttccttgagctgcaccacagccgtatacagatagggatccttcacaccgtcccacagatggggcttatccagcaaaatcaccgcattgctgccttcccctgtccctgccgttttacctttctggtctaatataaggacagaggtttgtgcttctggtgcattgttccagctttccacctggattttggcagttgtgccttccaccacaggcgtcaccttcacaccctggctgccataataatccatatcaaaatgctttttatttacaacaattaattttacatcacggtagattccgccatagaacgtgaaatccgccttctgtggatacacatgatcattcacgctgttatccacagccacagtcaggctgttttcctctttgagcagcggggtcacctccacccggaaggtggagtaaccgccgtcatgctggcagcagacgctgccattgagagaaacctgggcactggcatttacgccgtcaaattccagatacacacactgggtctctggatcaaaggcgggtgcggaaaatgtcacatcgtaggtacaggtcccccggtaataatcattaccgccgtcctggccgtccagattattccaggtatgggggagacagacctctgcggtttttccatcggggccggcaaactgccagcatcgattcaacagactctcttgtcttttcatagtttccctttctttcaagcgtggttcaatatgggaatttctcttccactaagcagggattagtcttttttcttctttaagcggattcccgcaatatccaggatcaaaagaactgctcccagtgctgtgagtactgccagcacatactgtgctgctgtcagagctgtggaccaccaaggtgttactgttaccaccatggtatctgcactgatcccatccattccacgggagtggagcacggtataaagaatacggtgggcggattctctcatagcctgagccagctgggcattttccttgctggcgtctggcccgtaagcagcaaactcataactcaggtcactggttcccttttccacagccgttccgctggtgccaggatagttgtcaggaatgtcgtttccggccagcacctcatgaggcttggacatatagcttccgtcatacatatctgttactgcgaaaccagtcattccggcttcacctctcagccaggaggtctgcagctcatacatagctccggaccacatagcgcccagacggttgaaagcagtcatcacgcacttggcatccccgtttacaatgggaagctcgaatgcacgcagataaatttctctcagcgcctgctcgttgcaccaggtaccaattccctgccgctgttcttcctgatcattcagcacaaaatgcttgttataaacatacacacccttggactggatcgcctttgtctctgtgccggcaatcagaccggtgagaacgccgtcttctgaataatactcaaatacacggcctgcataaggtgtcctgtggatgttcagtcctgttccgtagaagcctgcatagcctgcccacatggcatcctcgccaatgagctctcccacctcttccacaagcttatcgttaaaggtggctgcgatgataccgttacaaggatagcaggttcctgtctgatccttatccgggtcatttgtctggctggcataaccgttaggtccaatgctgtatttctgagtcacaccgctggggccgttgtggtccagggtttcgggcttgccgatctcttccactgccacagtcatacgcagacccactgcacacagcttgctcagctggtcataggtgagctggtccagaagatcttcccacataggatcgtcataggcaatggcattgccctcctcatcttccagaaggtcaatgagctgataggtggtttccgtggagcccatggtaggccagttgtcatcgttttccggaagatctgcatcatccagaacaacatccgccgcgatctggtctgtcatggccagcttcacataattggtgttataaccgtcatcgtctggtgtccaaagtgcagtggttccttcccagtcacttctggaaatataagtcacgctgttgtctccgctgccctcgtagcggttcacatcagctgctgcaaacaggcttgtcacatcatttcctgtgccgtaagcctttgcataggtggtattgtcaaaatcgtaatccgtagtgtaagtcaggtccttatttccctcagcggtcattccgtctttttcggtttttccttttgcagccagaatgttgttcactgcctcatgggagttgtctgctgctgtgaaataataagtgccctcatctaaaatataaacgccggaattgtaggcatcataggaggtaaggaagtactcaggaacctccacggtgacagtttcacttgcccctggctccaggagctctgtcttgccatagcctgccaattctgcagatgccttctcgatctggttctctttgtcataatccgtataaggcttctgcacatagatctgaacagccttcttgcctgctgtctttcctgtgttggtgaccttcacagacaccgtgtatgtagtatccattccttctccggacttggagacctccatgtctgacatctcaaaatccgtgtagctcattccatacccgaagggatatgccacaacatcctggtactcatagtccccagccttgtccgtacccaggaccacatcctcataacgggtctctgtgtagcggtagccaacatagatgccttcctggtacaccacatacttatcaaacacacgggcattggaaccaagctgataagcctctgcaccttcataagcatagcttccgaagttggccattgcaggatctaacaggttatcggtccaccaggtatctggcagagagccggagggattcacagcgccggacaggatatctgccacgccgtacagaccggtctgtcctacagagccgatccacagggctgcatcgatgccgtagtcttcgtcctcaataaagtctgcagaaatgggattggcactgttgatcagcactacgatggaggaaagcttgcctgcatccttatattccttcagaccttcaagagttgctctttcattcttgttcagagtgagatagtctccgttctttccatcatcgtggtccacgcttttaaggtcatttgcctcgccgcccacacggcccacaacgaagatcgcagtctctccttttccgaaagagtctgccgcgtcagatttctggatctgcttccaggaagcctcattgatatttccagtgtcaaaatcccggcccttctcggaatcaaaataccagtccagtaagtcctcattgactaccgtatagccgctctctgtgagtacctgcacataggtgggtgcatctgcagaggaaacagcgccggagccggtgcccccgtacacgggagagatggcagttgccccgaacagggaaacctcttttccagtgagaggcagagtatcattgtcatttttcagaaggacggcgccttctccttccacctcacggaccttgtcaaggccggccgccttcagttctgcaactgacgtaaattcactgtcatagtatctggcatatacatctttgtctaactcgccgccgtccctgctcactgttttggacgtggaaatgcccagaaaagaattaatctggccggcaaaatcattggcgatgctgctgccaaagtacaccagcaccagcaaaacagccatgatgtttgtaaaaaccttcttcaacgttcttctttttgaagacttcataagcagtctcctctctttcttgaaattatctcgtgcctgaaagcacggtaaccttagtgtccacgacgccggcaatgcggtgacagcacgcggaagctctgcacaaagcacggtgtattggcgcaccacatcggaattcagatgcccagtacatttacaaagccttcacattctctaataatatatctttttattctatttgaaaagtcctgtactatgtcgtgtataatctgtattatgccgtaagaccccgttccgttcatttacgaattttttatatttttaaagtccatctgttgtcgtgtataatctcttttttgccgtgaatttatccaaaatctccccatgcagcccaggccatctttgtgaacaattgacataaaaccttatttatgacataatagtcacaataaaaaaggtactgtactgtcagtgcttttgcagtattcagagaaatgcggttccctgtttctgcgttttatttatacctctttgggcttctcctattttcgtgcttttacacgatcctggcggatgtaccaaataggtatcccattgtatttttaggccctttggcgctgctgccctccagctttgaacatcggcatgctgtttgtgcgcatcagtatcctgtgcggccctttgcgtatgattttttattatgtttttatcatggagaaagacgaaaggagttattcttatgactgccaaccaaaatgctcccattaaaaaagctgccggcttctatgtcggcatttgcgcctgcgtgctgtgtattgcagccgctgttctgtacggggtgaagttcagttccatctcttataaggaacccatcttcaattccaagatctgtatcctgctgggcatcactgccggcgttgctgtggttatgctgctgatccaaaagcttgcagcctatgctcccgtgatcctgtgtgccggaactggtatttcctttatgatgtatgtgaaaatgatcatctggcctgtttctgacaccatatacggcatagagcccttcccttacatcaacgaactcattctttgcaccgtactgctgttgctgagtttcgtattttctgaggtttccttgtatttgaagaagaccaaagtaagtaagacgactgcttaaacagagtttcttatagcacacaacaggatcctgtacccaggatcctccgcccagagggcggaccagaaaaagccctggcgtatccgtttatttgggatacgccagggcttttttctttatcttttctttttatattcagatggatttatttcagaatccaaaatagcgcatggcatttccatagcaaatgtctgtcaccatttttttcaagtattccatatctctgggatactctccgttctccactgcctttccgatcatacagcagaggatcctgcggaaatattcatgccttgggaaagacagaaagcttctggaatcggtgagcatgccgatgaaggtggacagtaaaccagtgctctgcagcgcctctaactgcttctccatgccctttctgtggtcacagaaccaccaggctgccccaagctgtacctttccccggatgccgtctccattcccctggaaattccccgccattgcggcaagcatatctgcatccttgggattcaggtagtagagcactaccttgggcagctcgtcggtctggtccatggcatccagcagggcggacagctcctgtgcatagttaaaatctgccgggctgtcatatccatgatccacacccagcttctggtacattcttgtggaattgttccgcatggctcctatatgaagctgcatcaccagattgtgtctggcatacctttttcccagctctgtcaaaagatagccgtgatatttcctgcattcctccaaggaaactgcctcacccttcagcctcttctggaagatagcatcaacctcctccttctgggccggaaggtaaaagcccatctccaggctatggtctgtgacacggcagccattgtccacgaaaaacaccagccgctcctccagacagttcatcaggtcctctatgtgatccagcttcttcccgctcacctttccaaggcgtgttatataatccgcaaattccggtttttcaatattaatggccttctccggacggaaggtaggcaggacccggatggggtatccgttttcccggagccttcgatggctgctcaggtcatctgccggatcatctgtggtacacaggatttccacattctgcattttcagaagcccgctcacacggtattctggtgtctgaagctttgcattgcaggcttcccagatctcatctgcagtttccggggaaaggggctttttcacttgaaaatatcgctgcagctccagatgggtccaatggtacagaggattgccgaaacaatcctgtacggtcttagcccatgcgtcaaactgttcttttgtgccgctcttttctccagtgatcagctcctcaggaaatccgtccgcccgcatggcccgccatttgtagtgatcccctccaagccaggcctgggcaagattctcatagctggtatctgccagcatctgcccaggatccagatggttatgaaaatcaatgatcggcagctttttggcacagtcatgatacaattctctggcagtttcattctccagtaaaaaatcttggtccataaattctttcatcgtcccatctccttctagacatccaaataggctgaaaatcctcagcttctttttttgtcctcagcttttccttctgttctctccagcatatcccagcagccccacagatacataatgcccagcgcccggtcatacagtccgtagcccggacggcagtgagcctcttctccccagatatggcggccatggtcgggacgtacatagcctgtatagccacagtcatggtaagcccgcatgatctccaggatctgtgtatctccgtcacagtctctgtgggatgcctctgtaaaatctccgttttcataatgtctcacattgcggatgtgtgcaaaagcaatgcggtcacagtaggtgcggataatgtccggaacattgttttccttgttggctccaagagatccagagcacaggcacaggcagttgtgttcatcgtccaccatggacaggaaacggccgatggactccttgtctaccagaagacggggaatgccgaaaatatcccagggcgggtcatcctgatggatggccatcttgatcccggtctcatggcaggtgggcataatggcctccagaaaatacttcaggttctcccacaatttttcctttgtcaccgggcggtacaggtcaaacagctcgtccagcttggccatacgctccggctcccagcctgggaaggtcatgccgtgaagatttttcaggatataatctgccatctccttataatcctcctggatacgggccttctcatagaaaagtgcattggagccatcctccaggggatggaaaaggtctgttctggtccagtcaaaaataggcataaaattataggttactacctttacattaaactttgccaggttgcgcagagtctgtttgtaattctcaatatatttgtcccttgtgggaagtcctactttaatatcgtcatggacattcacgctctccacaacatccatgttaaatccgtgtccttcgatctgacgctgtaccttggcgatctcatccacttcccagacctcgccggcctgtttgtcgtgaagagcccataccagtccggtgactcccggaatctgtctgatcatatcctgtgtgatactgtcattgccttccccataccatcgaaatgtcatctgcataatgattttttcctttctgctatcgctgtacccttgctcctgctccgcccataatggcttccacttccttcttgcttgccatggtggtatctcccggtgtggtcatggccagtgcgccgtgagctgctccatagtttactgccagctgtgcgtccccggtggtcatcagaccatagatcaagccagaggcaaaggagtctcctcctcctacacggtccatgatctccaggcccttgtagtcttttgctttatagatatttccgtctgcccagcagatggcgctccagtcattgacggttgctgtcttcacctcacgcagggtggtggccactgccttgaagttgggataggtttttactgcttcattgatcattttcttgtaaccctcaagattgagctccttcaggttctcatcgtttccttccacttcaaagcccagacatgccgtaaaatcctcttcgtttccgatcatcacgtccacatacttggcaatctctttgttgacctcctgggccttctccttgccgccgatagcgctccacatggacggacggtaattcaggtcataggaaaccacggtgccatatttcttagcggttttaatggccgccagaacggtctcacaggactgctgggaaagggctgcatagatgccgcctgtgtgcagccagcgcactcccagctccccgaagatgtagtcaaaatcgaaatcctccggggcagcctttgagatagctgtattggcccggtcagaacagccaacagcgccccggatgccaaagcctctctctgtaaaattcagtccgtttctgcagattcttccgatcccgtctgtcttcatccacttgatcagagaagtatccaccccgccctggagaatcagatcttccagcagcaggcctgtctcattctctgcaaaagctgtgataacgccggtcttcatctgaaagcatctgcgaagacctctcaccacattatactctccgccgccttcccacacacggaactgtcttgccgtgcggatcctgccctcgccgggatccagtctcagcatgacctctccaatggagaccgcatcatatttacattccttttccgctctcagctttaaatccatattctgctccattctgccgctgacgcggcctatgtaaaaatttttgttttatctattttatttcatctgtttcaccagctcccgccttgggccagtgcagcctttggtcccttaaggaatgggggctgatgactgtccgttatccttatgaattacggatggattttaccagattcaccgcctgggctgtgagttctttcactttttcgaaatcccctgctttgataaggtcgccgttcaccatccagcttccgccgcaggcaagaatggtctgatttttcagatactcttccaggttggaagcatttacgccgccggtgggcatgaacttgatcccagtatatggggcggacaaggctttgatggtgctcaccccgccatactgctgggccggaaagaattttacggttttcaggcctctttttacagccagagccacctcggaaggtgtgacgcatccaggaaataccgggatgtctttttccaggcagtaatctacgatctccggatcaaaacctgggcttacgataaatttggctcctgcctgtacggcctggtctacctgctgtgtggtaagcacagttcctgcccccaccagcatatccgggtacagctctgtcatcttcttaatgctctctgcggctgcggcagtacggaaggtgacctccgcacagggaagtccgccctcaaccaatgccttggccagtggctgggcatccttcacatcattgagaacaactaccggtactacacccaattttgcaatctgctcttctacgttctgactcattaccttttcctccattttcatgtgaatgtctagtttttctcctgcttttatgatatattataaaggaattccaaaggaaagaacattgctcataaactacaaacacattgcaaaaacgacactatagaaatggggggtgattctatgatcagacagaccattaacctgttctgcaaaaagcagcatatggacagctcggaatatgagatctacaattattcagacgatgagctgcccaaggtgtttccccataaacatgatttttacgaaatctattactccctcagcgaccatatagactattcggtggataatcagatctatcatttaaaaaaagggagctttctgctgctgcctcccggaatcctgcattatccctctgagaagtccctgaagcccggggataaatatgcccgcattgtactttggtgtaccatggattttttccgtacctttacagccattgacccggacctggaccgcatgtgggccactgttatggccaacaaggaataccacatccgtcccctggcaggggcctcctcccatttgctggatttgtttctccgtcttcttggagagcatcagaaagaggaatttgtctcaagggcaatgacctattccatccttctggagatctttgcctccatcaaccggggaatacacacctctgcccattttgaaaggcctgccccaacggtaaagctcttcgacaacattatttactacatccacgcccatctcacagaggaattgaccctgggcaccctggcggagcatttctacatcagcaaggggtatatctcccgcctcttccgggagtacatgggcattcccgttcaccagtacatcctgtccctgcgcctggagggctgccaaaaagccatccgctccggcgcttccatcacggatgtgatggagctttatggatttcatgattattccaacttttaccgggcatttaaaaatgctttttcagagtcccccaagcaataccagcagtcctgcctgaattccagacaggaggatcccaccctggagggtgcatcccccggaggttttttacaatagcagcttcccaaggaattttgttgcataagggggctgtcggttaatatcgatttttgccccctgacacgcaaaaaagagacaatcccatagtattcgggctttttcaaagcccggaagctctagggaactgtctctttctttttgtgactcttattttagggcgcacccccctatttggattttctgaagcgctcctttatctacgctgcttcctgtttgagtattccggatgattttggttcttccgcatatttgggtatttatgtatatggccggtatatgagctttgcagacaatagttgacggctacagcggccatacatcgtccgtttcaccattttcagtttgctattggttccttccacaaatccgttcaactacggacttgccacaggattttcaactgcctccatatccctttttaatccttttgcaaaacgtggcagatcccgcatatcagaatttacatatttctcaataaacaggtacaacaacactctagcattcaggacacaccgtgtgataaacttctattgtccatatggaccacctcctttgatatcgagtttggcttgcgacaccattctcattgtatcatgggaggctttttattgttatactcaccgttcctacttacactattctccccagcatagctgggggattaggcttttcattcaactacatcaaataatcgcaatctttttataatctcttctggttcaggcagcatctctttcatatcatctggcaatgaattgctcagacgatatgtggctacgcctattggtgcattagattgtttcagtgcatactcaacaattgttttatctttacttttgcaaattatgattcctattgatggattttcctctggtagtctaacctgctcatctaacgcagtcaaatacaattgcatttttcctgcatattccgcttcaaattcgcctatctttagctctatagctatcaggcttcgtaatctcctgtggaacagcagcaaatcaatatataaatctttgctgcctactatcatatggtactgattacctatgaagcagaaatcaccacccatctcaaccaaaaatgctctgacattgtttaccaactgcaattctaattcatgctccgaatattctggcgaaagttccgcaaaatcaaaggaatactcatcttttaccgccaatttcgcctgtgttctccgctcttttggcaatgtcatatcaaagttagtttggttaagtaagtatttctcatatgtctgtgcttcaataaaatttgcaaggattcgtttcgtccagccatagcgtatgctcatctgtatataaaactctttctgcagatcatctttgcatttttccattatcacaatattgttactccagctaatttctcgcaccagcggtgcgagtttttcagaatcacggtaattcaaataaaagttacgcattctccataaattggctgccgaataaccctttgctcccggaaattccttttgcaattcttctgacaatactttgactatggatttcccccaacctttctcctgctgctgattatagatttcctcgcctatttcccaataaagattaatagtctcagcattcatcaactttaataattgatattgccttttctgtatcttgtctttgatctcattaaccagtggttcataacctatgataatgtctgtctttatcatattccctccaaaactcgcgccactggtgcgagttttctttacttcccattatctctatcgattcttccaacaaatcaccaatggaatatcctttgtacttcacctctaatacttcttctataaaacgctttcctccacaatctggacatacaacaaatgaatccggcaaataattaagtacaattttcccgacacctgttccttgacaagtttcacatctgcctccagcgacattcatgctaaatgcagatacagaaaatccaaactctcttacctttgtttcctttgcatatagatttctaattgaatcaaatatttctaaatatgatacaacggtagaacgtggcgtctttcctatgggtttttggttaacaacttaatactacattctggattaatagaaacaattgcttttttagtgactcgactttaaaaatcaacaaagggaccttctatttcccgacagacagccccttcttattacataggaaagttcactgaactttcctatgtaataaaaaccctctgggggatacacacaatgtgccccccctctcttgagtgaggggatggggagttgaagcgggcggctttagcttctttttttggcatttacctggatggcatagttttccgggttgtccagaaaatacacatgataccataccaggaaaatatagatgcaccagattttacggctgttatccttctggccgttgtaatgctggttcaaaagccgcataagctccttctggttaaagaacttgacggcaggggctgtctggaacatctgttttaccacattgtagtacttctcttctctcagccacaccctggtgggtgtggggaaccccagcttctttctcttggcagcttcttcaggaatggaattcagggctgtccggcggaaggcacgctttgtctcacttttatgaacccggttctggtgggagagctttttggccacagagaatacctccttgtccaggaagggaacacgggactccagggaatgagccatactcattttgtccgccttcataagaatatccccgggaagccagaaattaatgtcaatatactgcatcctggctgcttcgtccaggcccttggtcttgtcataatagggcttggtaagctgggcagggtcgcctgcttccattcctttggccagaacccgttccttttcgtccatgtggaacagataggcattgccgataaaacgctgctccagcggcgtacagccccggataatgaaatttctgcccttaaagcgtttgttcattgccaggaatttcctgcgcaggaactttttcaccgaagccggcacataatgaaacaggcgaagagaatctggttcacagtaaatggtataccctccaaagaactcatcagagccctctccggaaagaaccaccttcaaatggtctgccgcaagctgatccacaaaatacagggccacagcagaaggatctgccacaggctcgtccatgtaataacagaaggttttcagcacatcccagtactcctggggagtgatcaccttctggtaattctcacagcccacctcttcagacatggccttggccagcccgatctcactgtagcgtccgttgtcctctgcaaatcccacagtaaaggtcttgtccacatctgcctcggcaaccacatagttggaatccacgcctccggagagaagagagcctacctccacatcgctgatcttgtgggcccggatgctgtccttcatggccctggaaatatcctcctgggcatcctccatggcttgctttttcttaggttcaaacatgggatcccagtattgttttatgtctaattttcccttctcatagatcatataatgggcaggcggaaggcggaagatccctttgaaaaaggtttccggcagcacagaatattgaaagcttaaatactggcccagagcctcctcattaaactccttcacataatccgggtccttgagaatccccttgatctcagagcagaacaccagcttattgttaatgatcccataataaaagggcttgatcccaaaaaaatctctggctgcaaaaagtctctgtttcttaatatcccagatggcaaaggcgaacattccccgaagatgctggagcagctcctctccccattcttcatagccgtgaagcaggcactctgtgtctgactggttggcaaatacatgacccttggacctcagctcctggcgcagctcatggtggttatagatctccccgttaaaaacgatcacaagatctttcttttcattgtacatgggctgggagccattatccaggtcaataatactcagccgccggaaacccagggctgcctggtcatcaatatacactccgtcactgtcagggccacggtggataatgctgttcatcatatctctgatcacggtgtctttttctttacaggtaccaataatgccacaaataccgcacatattttctatccccttttaatcgtttacatattaatataccacatttcgtataatacttgtagaattttttatttttaactcttttttaaacaattacatttggtcccatgggaaagttctaagaactttcttatgtaataaaaaacggggcagtttgtgttatcctgccccattgcaatcattaaaattcatttcccggaaatttcgggatgccgtcaaatccggctttcaaatcttcatcagttggtatgtagtccgtcatggtgccatcgttgaaacgctcataggccaccatgtcaaaatatccggttcccgtcaggccgaagacaatggtcttctcttccccagtctctttgcatttcatagcctcatcaatggcaacgcggatggcatgggcactctcaggagccggaaggatcccttccactcttgcaaactgctgggccgcctggaataccgcggtctgctccacagagcgggcttccatataaccgtcatgataaagctgagacaaaatgccgctcatgccatggtagcgcagtcctcctgcatggttggctgagggaatgaaattgcttcccagagtatacattttctgcaaaggagtcaccatgccagtgtcacagaagtcatacacaaattttcctctggtaaggctggggcaggacgcaggctccactgcgatgatctgatattctctctctccccggagcatctctcccgcaaagggagaaattaagccgcctaagttggatccgccgccggcacagccgatgatcatatccggcacaatgtcatatttgtccagagcggtctttgtctcaaggccgatcactgtctgatgaaggagtacctggttgagcacactgcccagtacatagcggtagccttcatgggtggttgcctgttccactgcctcagagatggcgcagccaaggcttcctgaggttcccggatgctctgccaggatctttcttccgatctgggtgctttcagaaggagaaggggtgacggaggctccataggtcctcatgacctcgcggcggaaaggcttctgctcataggagcattttaccatatatacctggcagtccagtcccagataggaacaggccatggacaaggctgtgccccactggccggctccagtctctgtggtaacccccttcaggccctgctttttggcatagtaggcctgtgcgatggcggagttcagcttatggctgccgctggtgttgtttccctcgaatttataatagatcttggcaggtgtctgaagcttttcctccaggcagtaggcacgcaccaggggggagggacggtacattttatagaaattgcggatctcctcaggaatatcaatgtacggggtatcattatccagctcctgctgtaccagctctttgcagaacacggcctccagctcctgggctgtcatgggctgtaaggttcccggattcagcaggggggcaggcttattcttcatatgtgcacgcacattgtaccactgcctgggcatctcgctttcttccaaatagatcttgtatggtatttcttttgacataatccttctccttgtgtcgttctttctttattttattccagattcccctttcactgtcaaaagaagaatccatactgattttattacaatatttataacacactcccccggttccgtcaaggaaattcctgtcacaggtgcaaatgtctgccacacacggaaattcccagggatttatggttataaagaaaaaaagagagatacccctgtggatatccctctttggattctttcaattagatgacacgtcttacggaaagaatagtgtcataagcagcattgtcactgataatgatcccttgatcagagttggctgcgtgtacgatcttaccgtcacccatataaatcgcgatatggccgccatagcagatcaaatctccaggctgtgcttctgaatagggtacctcctggcctacagtcatctgctcgtaggaggttctgggaagactcacaccaaagttgttatatacgctctgcacaaagcctgaacagtcagcgccgtccgtaaggcttgtaccgccccatacataagaatttcccacaaactgagttgcataatctacaacgctggagcctccggagccggaacttcctgctgatgagctgcctgcatcacctgtgccggatgcatctcctgtgttggtggtatcgcctgtaccagttgtatcacctgtgccgtaatcaacagttccgctgtccacgatcaggttgccgtattcatcatactgtggctctgcagcatccgtaccgtctgtacttccttccacataaccattgccttcctctgtgccggataccacattgccgtattcgtcatactgaggtgtctgctctgccgcattttcagaaccatcctgggactgaacctgctgttgctgagcctgctgctctgccgcctgagcctgtgctgctgcctgggcttctgcctcggcctgggcctgggctgccgcctgagccgctgccgcctgctctgctgcgatccgctcagcctctaactgggcaatctcctgtgtctgctgctctaaaagtgctgcatactgataagcctgatcctgtgcataggcaatttctgcatcacagttggctgaataagcctgcttctcagagatctgatattctaattcctgctgctggagtgcatactcattgtgcatggcttccagctctgctttttcctgtgcatatttctctcccaggctcttcacctgttcaatggtgttgctatatttctccagactctctctgtctgcttcataggtcttctgtgtgaactctgctctgttgagcagctcagacagatccttggcatccatcatcatctggaaccatgcagtatctccgcctttttcatagaggtactggattctcttcttcattgcttcatactgcttgtccctggccttctcggctttcttcaagtcttcctgggtcttaacaatactgttttccttttcggtaatgtttccttctaaaacatttatggaaaccatgatgtttaccaggtttgcatccagctcattgatttcagcctgcagagcctgttttgcactctccagttcattgattctataatatgtattattcaacgcttcatttgtataggcctgttcctgtctcagctgttcttctctggatgcgctgactgtcataacttgagacgcactgataagcagcgctaaggatacgcataaaactctttttttcatgatttctcacccttcgtaatttctaaatctcactttgtaacaatctcgaaacactttcttgacttcttttatatattaacacaacatttccctggatgcaatacccaaaaagaaaaaactttataatttcgtaacatttgaacacagttttgtaaagaatacaggggagtgaaccaacactcccctgtaaaaccttccttattccccaaacagatttttcaaaatcttgtccggtgtcatgctgtagtaaccgtccggatccggcagcgtgccccggttccagcgaaggacatttacactcttgatataactgatcccggttcccacgttccagttaaaccggtttactgaacctgcataatatttctgcatatactgggacgccagagacatggcctgactgtacccgccgcttggtgtgggcgtgccgtccagctgaacaaaaggcggcgtggcgtgcacgatcaccagactgccgtcgctgcactgacctaaaacaagaaaggtatgtccctgcatgctggcaatgtctccaggcttaaatttattcttatagttattcttatttaaagtatcctgtttcttcaggcttccgaagccccgtcctgccagggtggaggcaaaggtggaagcttccaccacatagcctggattaccggaaatggtattcatggtgttgtaaatggtccatcccacaaagccagcacaatccagtccctttgccctggtattctgagacaggtccatataccgttcccaattatagctgccatcattctggaagtaccagcgcttccagatggagggaagccccttataatttgtagtaggctcctgccagccccctccccacacatatagggtatttcccacaggaagcatggcattctgcagaagactcttcagggttcttgtggaggtgggccttaccttcccctcccctgaattatgtcccttttcatacagcaggatcccgctggtggaaaacacataggtcttaccgtctatgacccgggttcctgtcaccatgacccctgttgccggttcaaaataataccggttcagggttaccagatgctggaaccagccagtgaccatgtagccggcactgttaaaatagtaggtcctgtttcctaccaccgtccgtcctctggaggcaaggcccgtggcaggcttaaaatacagcttccggttattcagggtctgccagccggtgagcatatgcccatcctgggtggaaaagtaccggaagctggagcctacctttacccggccccggatcatatgcccgttttttgtattgaaaaaatacttccggttatttaaggtgagccagccggtctgcatgaacccgcttttgggatcaaaatatctcaccactgcgtttgtagtgctgcgcacccagcccactgccatctctcctgtaactgtccggaaataccgtttctgccccttattgttggtgagccagcctttgcacagtgccccggtgccttttttgcagtaatatcgtttgccgtttacagtgagccagcccacatgcttctttccgttggaatcataataataggtatttttcccctctgtgacaaacccccgtttggctgcctgtacctctctggtgctgtaccctgccgcggcgcccccagccaagatcagcatgagcagaaaaatcccccacagtttccaggatctttttctttttaccttctccctcatttttcactccctcttatgtgtataatctttgctgtttttttacatttctgttacattttaatttattataatccaactacatttcccagtcaataaaaatcagtatttggcacagaaaaaagacaggcttctctgcaaagcctgtccttgtcattaatctccaatataaacagataaatccttcagaatctgatctgccgtcattccggaatatccgtccggatctgccagaacgcttctgttccagcggaaaatgtatgtcctgctgtcattgaaccagttgtctgtccagatatcgtatttgtatttgttatatccggaatagcgtttcatataagtctgtgccaatgtagctgcctggctgttataatttcctgaaggtgtagcggttcctgcgatctggggacctgctgttcctgaggaatgaagcactacaacacttccatccttgcattgtcccagaaccatccagatatgatcttcatgagctccaatgtctcccgcacggaattcagaaacgttgctgatatgggtcttcgttccccatccccggctcacataggtgttctccatggttcctgaccatccggtactgatctggcgcataacctgatagatggaccagcccacatagccagagcagtccagtccggatgcatagcttccggaattatatgcttttgcccaattggggtttaagcccactcttgtggcatcgctgtcatggccgcctccatatacatataaagtagagccaattggtttcaaagcctgaatgaacaaattcttaatgctctttgtctgaacaactgcattcccctgatcctccggggtgccgtttccaaccttacccagatagatcccgttgcctgcaaatttatgtgtcacaccatcgatagtcaccgatccggttaccatctcaccagtggatggtttaaaatagtatttgtcccccacctcatcggtgacccagccggtcttcatatatcccgtcttggtgtcaaagtagtaatattttccatcgatctgtgtccgtccagcagccagaaaaccgctggctggatcaaaatagcgcttattggttccaagcttataccatccggaatacatataccccttggaggcgtggaaatatcttctctgaccatccttgttggtgtaccattttgtgaacatgactccggttgtgttgtgaaggagatacttctttcctcccagagtcagccatcctgttttcatatatcctgtgctcggtacaaaatagtaggtctttccgtcaatggtggtccaacccttggacattttaccgtccttaccgaaatatctcatacgggcctgtgcaccttttacccatccggtagccataaccgatgttcttgtattaaagaaataggtgtcttctcccagatacagccatcccttatgatactcaccgtcgttatctatgtagtaagtgttcccgccgctcttatgaaatcccgtggtcacatttgctgcatgtacctctgtcagttccgtaccggcaattccgcagaacaggatcgccatagtaaaaagaagaattttccaaaaactcacctttcttttactgtcgcccataatccttaacctttcaatttttttgcaaagatgtaatggattaatttcgtttatttttatttcattacgattttattacatcttccttcccatagtatctctaaatcctcattttgtcaatataaaaaaaggacaaagtaaacaattaccctgtcctttcccagatttgttaacaaaaatgggcttctataaatattttgttaagtctgttagccggtctgccctgtggaccaacatttcagctgtttcctggtccggcaggctcagatccggcaccatcaccaccgggcagcctgcgctgtatgcagacttcaccccattgggggagtcctccactgccacacagtgcccgggctgttcctgaatctgttcacaggcatagagataaatatccgggcagggttttccgttctctaccatggaggcacaaatgatcctgtcaaatttatccaggatccccacctgctccagataagggcaggcccggtcctggctggtagctgtcaccacggccagcttatagcccttatttctcaggtcctttagggtctcgtccacccccggctttttctcaaggccgttctgttttatatggtctgccattaactccttgcgccgttcccggattttcatatagtcaaagcccggtccgtaaagcttctcaaatacaggggcggcgaatttagctgcaaagctgcgcatcatcagaagatgctcctgcctgatctcataaccatactccagggctgcctgcctccagaacctggtgagatatttttccgtatccagcagaacaccgtccatgtcaaacaaaacggccttcactgcggaaagcttcttcgtattttccattttctctctcttagagcatgtgggctcttaaataagccccgtccatagcacttaaataagctggcggtacgtcaaataccgtcttacaaccgttttggccttcctgatgcattctgtaggcagctcttgcatacgccacgatcacagaggaggtaaactctggattggaatccagcttcaggctgtattccatcacatgactgtgctcatcctcccatccggtctttccgctgcggatgacaaaaccgccatggggaataccgctgtggtttttcttcagctcttcctcggttataaagtgtacagtggtatcatattcatcaaaatagttgggcatggtcttgatctcctgctcaattctgtccagatccgccccttccacagccaccacaaagcattctctggtatgcttctgtcttgtggtcagatcaggattttctccctttctcacagattcaagggctgcctccacaggaatggtgtactgcttggcatccttcacgccctcaatgcggcggatggcgtcagaatgtccctggctcacacccctgccccagaaggtatagtccttaccgttggtgagaatggcgttggcatacatgcggtttaaggaaaacatccccggatcccagcctacagagatcaggcctatatgtccgctttctctggccgctttctctacatttgcgaaatgctcgggaatttttgcatgggtatcaaagctgtcaaccacattaaaccactgggcataatagggggtctgtttgggaagatccgttgcacttcctccgcagatgatcagcacatcgatctcatcctttttcttctctgcttcatccacgtgatagacacgggcgccctctgtaagaattttcacgcttcccggctcccggcgggtgaatacggccttcaattccatatccggattgtgcttcaccgcacattccacaccacgccccagatttccatagcctaaaattccaatacgaatactcattgtggttcctcctctttcctttgtccttttaacactttaatatcttaatatctccaggaaagcttgtcaatttttttctacaaaatcttcccggtcccctgtcgccctctcaagttagaagcagcacatcctgcctccacagcacatgttacagaatagattggccacacaaagcttggtgcacagatcaccgccgccaaactccatgcctccgtaaggattctgctgctggcggtaccactgggtatctcccgcctgcatacggttcaggagcatctgatactgagaattgttgggctccaggcgcacagcctccttgatatattccagggctgtcagattattccccaggcccatattggccatggaggccagataataccagcgcccgctgcgtctggacaggctgttgagcacattcatggcctggtcgtaataaccgttctggatatagtttgcggccgccttcatatgcgtatcctcctcatccccggagctctgggcctgcccgcctccataaccgccaaagcctccgaaacctccgaagcctcccgccgaaccggcgccgccttcgtaataactctcgccgtactcccgttctctcatgatctgctcataggcctgctggatctctttaaatttctcttcagcctgctctttatttggattgttgatgttggcatccgggtgatactttctgctgagacgtctgtacgcttttttcacttcttcgtcagtagcactcctggtcacacccaatacctgatacggatctgtcattttttctctcccgtggacttccggcgcttctcactcacatccacatagcgtttccacacgccggaatataatatatttcttaaaatttcaacatttttcaaaacaggcagcttctcgaattctctgcagcaggcagccatcatcaatgtgaggatgtcctttacctcctcctcgaagccctcctgtttatacctgtcggcaaataaattataagttccttttttcacatcttcttccacgtcatcgtaagcgtccagaagatagatgaattttcccaggtaaaagcccatacgccaaagggtaggtttccatagatcctctctggcagtgaggacttcccccataacctttccgaacagtccggacatatagtccagattcttctctccccgtctctctccctcatccagttcctgcagaaggcccaggatgttgtgaacctttttcttatagtctgaagcaacctgctggctgcccttgtttaagacttttgaatagaccagctttcccagattcctgtcgtccttccagtcatccgtacatttataataggaaagaagaatattcatatccgccgcatattctgtaaattcatttttcaccacattctgcttcttcaccggatgaaccatacagcggctggtgcctttcagggttctgggttcatacaccccggtgagaagaaggatcacaaaagtcatatcataattcaaggtcatctgcccggggatgccgtacttctcccggagctcccggcacagaccgcagtatacagtccggtaggcctcaaaatccttgaatttcatttctcccttgttaattaccacatacccgaacatgttaactcctctttataaatttctctccacattttgggcagctgatctctattttcccttttcctttgggaacacggattttctgcttgcatccaggacaggtgtaaatatgataatccttcctctgactcatcaggttcttttctttgttgaaccagttccgcaaaacggcgctcttctctagatatttctggttctgggcataccgctttgaaacattccgggataatatcctcacataggtgtagatcagcagcagaagtcctgcataatccaggatcaaaccaaaaaatccttttctgaaaaacatggaaaggacaatgcataccagtgcagcccccattagaaatctgctgaactggtccaccccataacgtccctgcataaagttccttaatttttctttcataatacctgtcactcattcctttctttctctgtcggtataaaatattaatattctactcctcctagaacagactgtcaagaaaggcggctcttttctttgtgaattttttctgaattatttgtgatttttttgtattttatgaataaactcaaaatacccgtcttcccaattgagaagacgggtgaaactcatctctttttcaggctaacacaccggccttttcttgtcaagctctcaggttctgcgatcttgaatgatttcaggggtcctggccttactcttttaccagcaccttttccacttctgcaatgtacatggtgtggtggtccctttgaggataccatctctcatcctggctgtggtcgtcaaagcactctggcttgatggtatccctgtacatggtgcggcatacaaggaccacactggcctccttcaccgctggaacaccgtctgcccaaaaagcgttcagcccggcgctggcccacttatcctccacgtccctgccggatacagagccgcacagattcaaggcctttctatattgttcatccaaaatggacaatgtaaaacgtccctgggcatctacaaattcttttgtatatctctgaggccggatgtacaccgtcactgctggttttccccacatcactcccatggctccccagcttgccgtcatggtgttgctcttctcctgggtacccgccgtgatcagaagccactccctgccgatggcatgaaatggattcttattgagctcctctggtttgatctctttccaattctccatttgaattacctccaaacttatcgatttcttatttatcagtgttccctgcacacctggaaaatatagaatttcaagtaataggactcctgggctgcccacaaaatgggatgatccggagcctgggtccggtattccacctgccgcagtcttcggtgtacattgcccgctgcctgtgcaatggtctgggtaaacagctcataggacataaagtgggaacaggaacaggtggccagaaaaccaccgtccttcaccagcttcatggcccgcagattaatctcccggtagcccttcaccgcattttttatagagctgcgggactttgtaaatgcagggggatccaggatcaccacatcgaactgttctccttcctcctccagacggggaagaagctcaaacacatcctcacacaggaatttcacccggtcctccagaccatttaatctggcattggcatttgcctggtccaccgcaagctgggaggcatccacacccagcacgctgtctgcccctgccagccctgcatttaacgcgaaggagccggtatgggtaaagcagtccagaacccttgccccagggcacagcttctggatggccagccggttgtacttctgatccaggaaaaatccggtcttctgtccatccttcacatccacctgatactttacgccattttcctcaatctccaccagggtatcgaattccgggcccagaaagcctttcacccgttccatcccctcctgaaggcggaccttggcatcgctgcgctcatagactccggttatcacaatgccgtccttacgcaggatctcccgaagaagctccacaatagtaagcttccaccggtccatgccaagagccagagactggatcaccagaacctgggagaacttgtcaatgaccaggccgggcagaaaatccgcctctccgaacacgatccggcagcttcccgtgtccgtcaccttcttcctgtactcccaggcattgcgaaggcgcatcctgaaaaactcctcatccaccacctgatgctcgtctcttgtgagcagacgcacccggatttttgaatttctattgagaaagccctttcccagaggatatccgtcaaaatcccggaccagcacaaggtccccattgtcatagcttcccatcacgctggcaatttcattgtcaaaaacccactgtcctcctgccttcagcagacgaccttccccttttttcagggttatcactgcaagactcatgttctttacggctccttttcttaggtaatatctttgttcattctaccacacctgtgcgctcttgccaacgcaaaataagccggggcagaaatgccagaagcagggtcagggcctccgtaatggggaaggacagccagatccccgtcaatccccatacctttgccattaagaaggcaatgggaatgagcaatagggccgcccttgcaatggacagggcaaaacctctgcctgcccgctcggtagcactatagaacaccgccgtcaccacattcagtccggcaaagagaaacccagcaaaataaatcaccattccctgggctgcataggcggccagctgctcattcccctcactgttaaaggcagccaccaccggggtacgaaggactgttaaaaccacataacagattagggccagcacagcggagcaggtcatccccagacggtacaccttattcagggagggcctctctccccttccataatacccgctcaccagaggctgcataccgctggcaatgccgttgaaaatggacagcaccacaatggaaatgttggcaatgatcccataggcagccactcccagattgcctgcgattcccaggatcagcaggttaaatacaatgagcaccactcctgaggccagctctcccaccagggaggacaggcccaaaacgcagaactccttgagaagatgaagctttatcttacatctggccacatggatagagctcttttttctaagccagtgggtggactggatccccagacttacaagaggtgcgatccctgtggcaaaggctgccccgaacatgcccatgtccaggggatagatgaaaacccagtccagtaaaatattggacaggctgcccaggatcatccctgccatagctgtgtttggccccttgtcattgcgcacaaaggccagaaaaacattattgagaatataagctggcgcaaagcacataatggtcttcaagtatacgtttgtcatggtgtaggtgatctggtcagcccccagcagacggctgataggcccagacccggcgattcccgccaaagcgatgagaagtcctgcccccaggccccacactaccgcattggtgaacacatttcctgcctcccggtcccttccctgggccttccagatggtgtaccgggtggcggcgccgattcccagcatgagaccgatcccggatataaagctgtagatggaaatagccagattcagggccgtcagcccgtccgggccgatcccattggcaataaaccaggtgtctgccaggatataacaggacaacccgatcattcccatcacatttgcacttgtatagcgaaaaaattcctttacaatctgtttttctttcattctctctccttgttaaactgcccggacgcacagtacaaagtgggcaagcccacttcaactgtaataaaagtacctgaacccctccttctaagacctaacggaggaattcaggcactttttcctgctgcccggtggcagcaggcaagtttttcataaggataggttttcttctaggaacgatggccggacactgccagcatatggctcttaatgagaaccggtcgcacggcattgtacaaaaacacaaccaggacaacagacactaccgcattcacaaaggtggccgctgcgctgagcttggccaaaacctgggccatttcctggggctgccccagaatgtactgcttatagaaataccccacaatgggatcagcgatcacattaaaaccaagtcctgcaatggaggccagcaggctccatttaaacacatacttgggatcattgctctcattgatctttgcaatcttatgggccacaagtcctacgatcaggccaatgcacagctttaacacaaaggtcttaggtgctcctgtaatgtacaccgggtccagaaggtcagcaatggtcattccgatggctcctgccagtccgccgtaccagcctcccaaaagcagggcccccatgacacagaaggcattgccaatgtgaagggaggtagcatctcctccaggaacggggatcttgatctgcaggaaggtaaaagccacaaaacacaaagcggctaaaatggctgtctccgcaagttttacaattgtactgttctgtttgttcatatcattcgcctctttcataacttttttctggcttaatgatactgagaaactggtcatttttcaatgtacaattttatgcttttttaagtggtcagtttggcccaacccgcccttattcttccacggtctccacaaaaatatcatagatggccttgatggctgcctcaaagtcccggttggcaacaccgatgataatgttcagctcactggagccctggtcgatcatcttcacgttcaccttggcgtgggccagggcggagaaaattcttcccgctgtaccccggttggatttcatacctctgcccaccacggcaatgaggcccaggtctgactccagctccacgaagtccggctgcacagctctgtggatgcctgcgatcacctgctgctccttttcctcaaattcatcctggtgtacaaacacggtcatggtgtcaattccggagggcatgtgctcaatgctgatcccttccttctcaaacacctccagcaccttccggcagaaaccgatctcactgttcatcatggatttctcaataaaaatagaggcaaagcctttctttccggcaatccctgtaatggtatattttggctttttgcaggtgctctccacaataaaggttcccttgtccagaggggcgttggtgttgcggatattgatggggatcccctcttttctcacaggaaaaatagcgtcctcgtgaagaacggtggcccccatgtaggaaagctcacggagctcacggtaggtgatggactcgatcaccttgggatcatccacgatcctggggtctgtcaccaggaagccagatacgtccgtccagttttcatacacatccgcatggatggccttggcaaccagagagccggtcacgtcagagccgcctctggagaaggtcttcaccttcccatcctctgtggctccataaaagcctgggataaccgcattttcgctcttagccagccgcttgctcatgagccggttggttttctcgtcatccagcattccatttttatcaaaacggatcaccgtggccgcatccacaaattcatagcccaaaaaggcagccatcaccttgccgttcaggaattctcctctggaggctgcataatcctttcccgcctggttcttgaaatcctcctggattaccttaaattcttcctccagggacagctttaagccaagccccttgatgatctcatagtatctccccttaatggccgtgagcttctctgtaaaatccagacccttggaggcctcctcataacaggcatacagcatgtccgtaaccttcacgtcattggaaaaccgcttccccggggcagacggcaccacaaaccgtctgctgtcctcacttctaatgatctcacctacttttttaaactgctccgcattagccagggagcttccgccaaacttcactacttttttcatcattcattctcctcatctcaactcagggggaccttccccatccgccttgccgccggctcctaacctgctctggttaagtttttggctgtgactctttaccattctaaagtgtattcactattttattacaaccatacctggtatttcaagtactttcttgtaatttcaggaagaaatttgcgtttccaggcctttttcctaatctacagcacttgaaaccggcgcagggcatggaaaatgccgtcatggtccacgtccagggtcacggcgtgtgccgcctgctttacatggtcctggctgtttcccatggccacccccaggcccacgtggcgcagcatggaaatgtcgtttcctccgtccccaaaggccatgcattcctccagggaaatgtcataatgctccaggatccggtcaatgcccacatccttgcccccctgggctggcatcatatccataaattccgggatccatctggctgttttacactctggcagaagctggttcagctccgcctcctgacggggatctccccagatgcaggtctgatacaccggatgggtgagcactctgtccagggtgtctgtggggatcacaggagacccgatggtgtcatacaccttgcgcaccccttcattgacaaagttaatatacgtataatcagactccatgaactgacaggggatgggatttctttctatataagaaagaagacgttccagggcaggggcagggatgggattttcatagatgaccccctcctggttgtagcaatactgcccgttcatggtcatataggcatcaaagtcataagcaaagtcctcttccttgagcactgccagattggaccggatccgccctgtggccacaaaggtccggatccccttgtcccgaagggcaaggagggccttgcgggtgctttggggaattctgtggctctgaaagctcaccagtgttccgtctatatcaaaaaaaactgcctttatcattttttctcttcctttctcttcctgtctagagctctccccggcgtcttaagtaatctctgggtctgcatcccatccgctcccggaacaccttggagaaataggccgggttggtaaagcctgtgcgctctgccgcctgggtgatggtgcagcttccctctgttaaaaggggaaggctctgttcaatcctgtagtccagcagataatcaaacaatgactcattcatatgctttttgaaaaagcggcagcactcgctgggacagatgttgatcacccctgccacatcagccagagagatcttctcctggtaatggctgtggatataggtgaggatctgcttgagacggtccatattttttgcagccgccccatcctggggcagctccctttgatgctggcacagcacccgccaggcattcataagcaataaataaatctgaaaatcataaccggtttcctttttttcatacagggcctccacctttttcagctcctccaaaagctccctgtgccacctaatgcctgggtcaaagaaaaagctggaaagggacggattttccacgatccagtttacataattcttctgaagaaagctgttttcaaagccgcccagcagtctgggatgaaaggtgatggacacatagtggcagtcctggtcattcaccggccttcccgtgtggagcatgttagaattgcacagcagcccctggccttccttgagaaaatacgtatgctcattgatctgatactgcatctccccctccagcacataggtccattccagttctgtgtgccagtgccatagaaaggtccgccgctcataggcagacagccgttcatgggataccagcacaggaaattcataggtgccatggggctttctctcttttttgttgcggtctgtattgatctgcataaaaacctcaatataattatacaacttctaaaaatagtagtagaaatgcattcattttctcattataatggtattaacaacaatgtcaagatgcaaacagggtgaaaaaataaaggagaagactactatgaaagcagaacaagtaaaagaagcgctggccaaagaatcctccaagaagcttttagaggaaatgtacggaaaaggcagagcagaagaaaatgccaagcgttatgagaaagctgcccggggctttttgaaaagctttggggacaaagagttcgaattcttcacctcccccggacggacagagatcggtggaaaccatacggaccacaatcatggaaaaatcctggcaggcagtatccagatggactgcgtggctgccgctgcccccaatggcacaagccaggtacatattatcagcgagacctataagcaggatctggtcattgacctggacgatctggcccccaacgcactgaccacaggcactctccccctggtgcggggcgtattcgcaggcctgaaggagagaggctttgtggttcagggctttgacgcctatgtgaccagcaacgtgatcggcggctccggggtgagctcctctgcctccttcgagatgctggtgtgctccattgtggactatctgttcaacaactacacaagagacgtggtttcctatgcaaaagcgggacagtacgcagaaaataaatactggctgaagggctccggccttctggaccagatggcctgtgccgtgggcggtatcatcaccattgactttgccgattctgagaatccggctcttcggaaggtaaactgcaactttgacgacctgggactggatctggtgatcgtaaacactggaaaaggccatgctgacttaagcgcagaatactcctccgtgcccaatgaaatgaaaaaggttgccaaattcttcggaaaagaggtgctggcacaggttcaggaagaggacgtgatcaagaacgccaaggccatccgggaagctgccggcgacagagccctgctgcgtgccttccatttctttgaggactgcaagcgtgtggaaacccaggtagccgccctggaagccaaggaccgggagaccttcttaaaggagatcaccaactccggtaattcttcctggaaatggctccaaaactgttatgtcaccgagactccagacgagcagtccatcccctgtgccctggctctcaccgagctgttcctggcagatatccatgacggcgcctgccgtatccacggcggcggctttgcaggcgtgatcgccgctttcctgccaagggaatacacggcccagtactgcgaatatatcaaccaagccctgggagaaggctctgcttttctcatgcacatccgcaatcagggcgccatccgtttagagttttaacctgattggtcctgacattctccgcctcctcatcaatcaattcgctctttttgtaggcggagggtgtcatttccataaatttgccaaaagcagatctccccggaaaccatacaaaggctcccggggagataaacaaactcaattcttaattgcatcgtcaaatttcacatccgaaggcgcgaaatccacctttctcacaaaggctgcggcctccgtggctccatagatccgctccatgccgctgtcttcccactctacagaaagcggtccctgataattggctgcgttcagcacacggataatattctcgaaatccacatccccgtgtcccagagagcggaaattccagcctcttctcagatcaccaaaatcaatgtgggaacccagaagtccggtcctgccatccagagtcactgccgcgtccttcatgtgtacatgataaaccctgtccataaaatcctgcaggaaaatatgaggagtcacaccctgccacagaagatggctggggtcaaagttcaggccgaactccggtctgtccgcaaatttttccagaagacgcttggtggaataatagtcaaaagcgatctccccaggatgcacctccagggcaaagagaattccattttccttaaacacatccaaaatggggcaccacagatcataaatctgctggaatccagcctccaccatctcctctgtggtctgagggaaggaatatagatatttccagatgggtgacccggtaaagcccgtcactaccttacagcccagctttttagcggcaacggcaacggccttcatggtttcgatggcccatgcccggatctcatcctttttccctgccagctctgcgggcgcaaaattgtccagacggggatcgtcgtaatctcccacgcactggccgataatatgtgctgccagtgcttccattttcaggccgtacttatccagcgtatccaggatatatttacagtattcatcatccttggctgccttcaccggatccagatgctctccccagcaggccagctcaacgccgtcatatcccatttccttcacggttttacaaagtgtctcaaactccatatctgcccactggcaggtggtcaatgtcaataatcttcccatattgctgcctccttagattttccttctatatatattggtatccgtcaattctgcctgttacaagccattcattcttccaggcccttccagttattcttccacgtccttccacacatttccttcctcagagcttgccagacaagcctccacaaaggccaggccctccacgccgtctctcgcagtgggatactcgatcatatcctctgtaaagctgccctcctccttggccaggatacagtccataaagtttctgtacagattgcccatggactcaaaccagccctctggatggcctgcaggaagtcttgtgtatttggctgcttttgcataaatacagtcatgacctctgtgaatctctgtaacagtgccgtcaggatttgccacctgaatcttctccggctcctcctggaaccaggaaatggagcccttggtgccgtagatgcgcacccgcagcccattgtcgcagccaatggtgatctgggaggaccaatacagaccggaagccccgttgtcatacttcaccatcacggtgtcattgtcatccagcactctggtgggaaccttgatctccatatttgccagaacctttttaatcttcagccccgtcatccgggccactgtattttcaatgtgcgttccaatgtcgcccagacagttggtcctgccagacagcttgggattggtacgccactcaccctgcttgtttcctgtgatgtcatccccggccagccagccctggatgtactcacctgcaaccatgcgcacttctccgatatccccccggtcgatcatctcacggatgtgcctgcacaccacatgtccggaataaatataagtcaccaggaaaagaagccctttttccctggccagtgcctccagctctctggcctcctccaaggtggtggtcagcggcttgtcgcaggacacgtggatgcctgcctccagaaacgccttgcatgccccatagtgagcatagttgggagtgacaatgctgacaaaatcaatgccgtcttctctggccgcttccttctgggccatctcctcataggaatgatagagacgatccttttcaatgtgaagctgttctcctgtgatacaggtattctcataggaccgggaaaaacagcctgccaccagaacagcctttccgtccaatccgatggatcttctgtgggcatccccaataaaggcgttctgccctcctcctaccataccatatcttaaaattctgctcattgtatcccttcctttctattttcttttaaaagtcccggaaaccggctatgtccccaagtatgcctccatcctcaggctcatagacatttccgttcgtgctctattaattggaacgcttgcggatcatctgcatacccacagccaccaggaggatcagccccttcaccgtatcattgagaagggcattcattccaagagctgtaatgatcttgtcgatcaaggtaaaggacatggtaccaaagacgatgccgataatattgccctttcctccagacatactgatgccgccgatcacaactgcggcaatggaatataattcgaaattctttcctgaggttgccggatcaaaggaggtatccttggcaattttcaaaaaggatgccagaccggtcaaagccccgcacatgacaaacacgatgatcctggtccaaaccacgttcacgcctgcaagcttggctgctttttcattgctgccaagggcatagatcctcttgccgaacttggtggaggtagtcatatacaccatcaggaccgccatgagcacaaacaccaaaacaatataggcaatggtcaaaaaggttccgttgccgaaattaaacagcgcctgatagctggattttgtggcgtcaatgcggtatctggtctcccccatctcattcatcatatactgagaaatggaacggaagatcagcatggttgccaaagttacaataaagggcggcatcttgatcttacctaccaggacaccgtttatgaaaccgcacagtccgcccagcacaataccgcaaagggcagtcaataaaatattgccggttttgttataaaacaatatggtgatgccccccacaagcacaaaggaagagccaacagacaggtcaatatctcctgttaacaccacaagacccatgcccagggctatggtacctaaaatggcactatgtaaaaagatattggtaatgctggtccaggtggtctgggagccgttcaccaccataaaggcgataaaaacaccaaaaaatacaatgataaaattatagttataccagaaattttttaaccgtttagccatgtgctccctccatcttaccttgtttttgataaactgcatttgtggcgtacagcatcactgtctcctcattgatctcctgccgggataacttggctgcgatccttccgtgataaaatacaatgcagcggtccgcaatcttctggatctccggaatttccaatgtgttcacaataatggtcttcccctcctgggcaagttgaaggatgaggcggtagatctctgcctttgcccccacgtcaataccctgggtgggattgtcaaaaagaagaatttctgcttctgtgttcagccatctggctaaaatcaccttctgctgatttccacctgaaaggctggtgataaaatcattatgagaatttgccttaatgttcagcaattcaccatatttcttaaatctttgtatttccttacttttttgaatatgttgattttttccgtcaatggtgtgctgggacagatacatattttccagaagggtcatatccgggagcacagaattttcctttcggttggaagccaccatggccaccttgttcttcatggcctgatggatactgcctgtgtgaagctcttttccaaacagccggatgcttccggaggtaatgggaagaaccccgaaaatggcctgcatcacctgggaggcccctgcccctgccagtccggtaaaaccgatgatctctccctttctcatctcaaaatccacatgggagaaggattctccgctgatatcctgtacctggaagatcacctcccccagctttctggtctcatacaaatttgcgctcacataactgtcacccaccatataccgggtaacttcctcagccgtcaccttggagatctccccacaatgaataaaacggctgttccgcagaaccgtataccggtcagcgatctggaagatctccggcatcttgtgggaaataaacacaaaggaggtgcccttctccttcaggcgcctgataatctcaaatagatgagcgatctcttcattatttaatgcagtggtgggttcatctaaaatgatcagcctggcattggagtgaagagccttggcaatctccagaagctgcttcttccctgtgtccagactccctgcctcatctgttgggcacagctccacacccatctcctccaaaagctccctggcctcctggatcatttcctttttcttaagccttcccagggaattggtcttctcttttcccagaaacaggttctcataaaccttcagatcattaaaaatattcagctcctggtgcacaaaagcaatgcctgcatgttccgcctcagagatggagccattgcccagctccttcccgtcaaagatgacggtgcctgcgtccttggtgtacacgccggccaggatgttcatcagggtagacttcccggcgccgttctctcccagcagtgcatggacctccccggcttccacgcaaaaggagacatcatccagcaccgtcacaccaaagaaggctttttgtatatgttccattttcaataattccactgtgattctccttcacctcttattttttcggaaccggacagtccctggattttccataaacagcccgtaccccctggcagccctggggctgaaagaaagatagggcggcaaaacccgccccctatctccctgtgatttctttgtgtgctcttattaaaaaattattctttttcttcgtagctgccgaatgcctgatattcttccacattctcagaatctactacatgtacaggaattacataatcctgatcaatgtccgcttcgccgtttaagaatttcaccattacgtcaactgcttctttgatcatagccgggtcgtaggttacggagaacagatcgtaagcatccggacgagtgatggtctgatgtttgtcttttaatactgcgtaaatttcagcaagaccggaggatgcgccaagagccttgaagttcccaaggaactcttccttcttgccttcatccagggctgcaccgtttaaggattccagaatacccattgcgatctcatcatcgtgggtgaagatccagttcttcttcgcaggatcacactgggcagaaccaaaccaggattcaaacaattctttacctgtgtcacggctccagccagtagctgcagatttcacaacaactgcatcgatctcttcgtctgaccagccctgctcctgaagatatgtgcggaagcctttggaacgaagctctggtacagaagagttgtcaccgatcatttcatatacatagtcctccttcgtcaggccgtcctcaataaatctcttggctgtctcataaccgattccttcgttgtcgcccttaacattggcaaccacctttgcgtcgatcacatcactgttgatcactcggtcaaactgtacgaagggtacatctgcggcagcgatcttctccagtgtggactgaagtccattgtcgtagggaagaattacaatacctgccagattgcctgtgttagaaagcagatcgtcaacctgctgaatctggttttcaacatccgttgccgcatacaccttggcggaatatgtgccttcttcattgatctcgtcaaccttctcctgggcataggtgagaaccgctcctgtccatccatggtcagcacttggaaccattactgcaatttcctttgcatcatctgcatgtaccaaaacaccggtgcctaaaagcgtggatgtcagcatggatgccgccaataatgttgtagcaatttttctaagtttcatatgaattcctccttttttcgtgtttcttgtggacacgtttttctatagtcataatataccattgttgcagccagatttgaggtgcatcttcatgattatggtgcggtttcatgactgggggtgagggagggaagggtatcttatttttactttggtgccttttggtgataagttttcactctaggagaggcagccgaaaaaataatagggaaaaatagagaaaaaggggatgcacacaatgtgcagcagcgaagcagctttcggcacattgtgtgcatcccagggggtattacataggaaatattcacttggacttacttggccctgtcacatggttttattatattaaacaccatgcaccaaaagaaaagcatagccagggcgcccagggcacttccatttatatccaggaccaggaacatgacctgggggactttcaggagaaggccccctatgcagtaaatggccgtgagccctgccataaaactgcagtacatgtctatgctacgtttctcggacttgattgcgcagaggattctgcccaaattcatgattaaggctaacacaataggcgtgatccaataaaaagacatcataatgtaaggattggtatagtaatacttctctttcaccatagaatgaatggcgggatatgctgaaaaaaacaccacagttaaaatgatctggacaatggttatcctggttatatgacggttctccttcttattcatagtccctccttcttcagagctgctcacagctcttccctttattttttgttggcccaatatgttttttctttccaatgctgtaagtccacctgcttttacactcatagaccttttccatcctgtccgcttaatataaaacagaagacactaccaatgatacttttattttaaaaatataagttattaaaaagggttataggcatgatgttataaaactagaagttatcattgaagaataaaccatctaagagtaaaacagtgaaaagtaatacatttcattaaatctaaaaaacatactaattcttcatattttaacgcaagtattgataatacagttttcttcatttcgcaaaagcatctcaatacttaactcttttaatactctaattactatacgttttaattttataatatttctcccaaaaagtcaataatattattgacatatctgttgtatatctgtaaaatgtttatattatattttttagctgctgactatttacttcggtttgactcccctcaagggagagacaaaactgtactattatagaagtttcatatctattgtcataatatttttctcactaaacagtttaatgaagcgctaaatagatttgataaaagttcctacatgtaatttcgtatctactttgtttcaaatgaacccgattccaaacctgtaatgactgcagttaacaaactatacatcatgttgtagaattacaaaagagatcaaggaggactacgaatatatgcgtttttcatcttcctcaatactgatggctgttttgaccagcaatttattaattattttcacacatttaattttccagaaaaagaaactgttcttaaacattggatataagattattggaatatttttatttcttactgtacttcgatttctttttccctttgaattgcctattactactaatataaattttccagaattaccatctagattgattgcaaactttacatgcccacgttttaaaataaataatataaacatatctttctttaatatatttgaattgatatggctgttaggtattatttatcttacatgtaaaaccttaatactttatttaaagttccataacctgattatctcgtgcagtactcccgtttccaacgaaatggaatgccaacaaatagttgaacagatttgtaagaaacatggcaaaaaagtaaatgtgcgtattcttacagcacccgttatctctgcacctatggtctgctattggaaaggttactgtatttttcttcctaagatgtctttttcctcaaaagagctttactacatattatcgcatgaaatggtacacattttttcacatgacttattattaaaacttggtattcaacttttatctattttttattggtggaatccattttgctacttattaaagaaacagtgcgatcttttactggaaatgcgtatcgacgaaacacttaccaatggagatcataaaacaaaagttgcctatttaacttgcttgctgcgtgttttaaatgaaagctcagagaaacctgctccaagtttgggaatttcattttgtcaaaacaaaacttctgctgtatcatacagattttatatgctaatgaaatcaccttcaccaaataaaaaacatttttcctttaatctgttttttgttaatatgataatcttcttatatattgcatcattttttgttatttttgaagccaagtatatgcctgattctataaaacaaacaacagaaggacacacgaaagagaatacccaaatttactacaatgataatggtacctatagtatatattttaatggaatactcgttgaaacaactgattcattaagatactacccagacaatttaccaatctataaaaaaggagaattgtatgaagagaactaaaagcctaaaaaaattattattttgcatttgtacaactttgttactaagtataagttttattactccagaaattcatgtttttgcagattcaactgtggaaggcataacttccagatctgataacatggagtggcggtataaaactattaatgggaaattatacagaagactatataacctttccaaaaaatgttgggttggagactggatactgataggatagtagaacaagtttcatgcactgcgcccgccggcaggattgaaggaggcttacccaagtcatgcgattttcattttcaagtgttcttatgactgttttaaccagcaatctattgattatttttatatattttatttttcaaaagaaggaacttttattaaatatgggatacaagatcctgggagtatttttattcctcactgtcctgcgctttctcttcccttttgaactgcccataaccacaaatgtctgccttccggaattcccctctaaaatcattgcaaactttttaaacccacgctttaccgtctacaatagagaattttctttctttaatatttttgagtttgtatggctgttgggaattcttatacttgtatataaaagcttaagactttatagaaccttacataactgcttaatctcatgcggcattcccgttcccaatgaggaagaatgcagtaaaatagtagaacgaatctgtaaggaacacaacaaaaagaaagcggtccgtgttctttgcgcaccagatctcactattcccatggtctgttaccgaaagggctactgtatcttcctgccccagtccacctttacctctgatgagctttattacatattatctcatgagatgactcatatcttttctcatgatctgcttctaaaattcggtatccaggctctgtgtattttttattggtggaatcctttttgctatttgctgaaaaagcaatgtgatattttgctggaaatgcgtgtggaccaaacactcacaaacggagaccataaaacaaaggttgcctatttaacctgcttgtaccgggttttaaaccaaagcacagaagagcctgccccagactttggtattcccttttgcagaaagaagacctcaagccttgtgcaaagattttctatgctcatggaagccccgccccaaaataagagaccgcctattatcaatctactttcactgtgtatggcggttttgttatatattgggtcattttttataatatttgaagcatattatgtgtccgattccatgaaagaagctttggatagcggctcaattgaacgatccaccccggaaaacacacagataattgataacggtgatggtacatttaccatctattttaaaggacttttcgttgaggttacagactccttagaatactacacaagcgacatacctatttcaaaaaaagagcagccataactgtatggagctgttgcaactattgcttcagctcctttattctgaaatcatctaaagcagagtaaaattctcaagatgagtatgtttttctgggtgcttctttgatgaagttaaatccgtaataattcctaacagtttcaataatatcattgacacctccctgtaatgtctgtaaaatattactattaaaattatttattaggtaatagctagattttattacatcaattacaaagcagaaaattcatgtacatatcatttacacgcaataccaaccgacaaaaagaaggaggctttataagattatgcggttctctttttcaagtgtgcttatggccgttttaaccagcaatctattaattatttttatatattttattttccaaaaaaaggaacttttattaaatatgggctacaagattctgggaatatttttaatccttactgtcctgcgttttcttttgcctttcgaactgcctatgaccactaatgtatattttccagagtttccctccaaagttatagcaaactttttaaatccacgttttaccgtccacaacagagaattctctctctttaatatttttgagtttgtgtggctgttgggaatcattatactcatatataaaagcttacggctttataggacattacatgactgcttaatagcatgcagtattcccgtcccaaatgaggaagaatgcagcaaaataatagaacggatctgcaaggaacacaacaaaaagaaagcggtccgtgttctatgcgcaccaaatctcaccgtccccatggtctgttaccggaagggctactgcattttcctgcctgaatcgtcctttacctcagacgagctttattacatactatcccatgagatgactcacatcttttctcatgacctgctgctaaaattcggtattcaggctctatgtattttttattggtggaatccattttgctacttgttaaaaaaacagagtgaccttctactggaaatgcgtgtggatcaaacactcacaaacggagaccacgaaacaaaggttgcctatttaagctgtctataccgggttttaaatgaaagcacggaagagcctgctccaaacttcggtattcccttttgcagaaagaaaacctcagggcttgtacacagattttctatgctcatggagtcacctcccaaaaacaaacggctgggtataatgaatctcttgactctaggtatcatcgggctgttatatattggttccttttcgataatatgtgaagcatattacgtacctgatttcttaaaagaagccctggataacggaacaatggaaagccctactccgaaaaacacacagataatagacaacggtgatggaacatataccgtatatttcaagggacttctttttgaggttacagattcgttagaatattatactgaagatataccaatttatgacaaaggagaacaatatgaaaagagctaaaattttaaaaaagctgctgctttgcagttgtaccatgatgttactaaatgtaggagttattgctcctgattatcaagtttctgccgccccagccacagaaaccataactccaagaagtgatgccataggttgggtaacaaaagaaatgaacggcaagctatacaaaaggctgtataactatacgaaaaaatgctgggttggcgactggattctggtcggataagcaaaacaaacgttaacgaacctcaacagatttcccttgtaaatataaattatctatacaaagctccaaagggtgcaggccaaaatcacgcctgcaccctttgttttttctttcacccctccctggcattctggaactgatccatctgcttttgaatttcctcaataatcttctccgaccctgcagttttcatctcctgtatgaattcctcatacaactccttccagttagagctggttccctggcagagttcttctttatatttgtccaccaccagatccaccttggccagctccagggcgatcatgcgggtatccaggttaaagccccgcagaggagacagaatggcattgtcattatattcctcaatctgctcaaattccccttccatggtctcataattccggaacacatttccaataacattctgggataacagatacaggtaggaccggtcattgtcagacatgcgggcaatgacatttccttccacgacaatataatgctgcttctccacaccgtctgccaagagccggtacagctcctgcccctcctgggaattcagaagattcaccagctccattgcctgctggggataccgggcacttttggggatcaccagggaatttctgcagccgtcataggagatataccggtacccgtccagctctccatacactgcgtcatattccgtcttcaccatgtccatcacgcttcccttttccccgtattcatccagaaaaagaatgctgcccttcaccttcccgtcctcgctggcagggtccagaagattcttcacgtcctccctgatataccctttctcataccaggaggccatggtctcaaagcaggcctcataggactccagctcatacttattgtacaccttcagcttcttgtcaaaaacccggatcacaaagggggaatctgccccgtagattccttcataccccttgtctgccagcctgcacaggcttttgtaggagactccggtaccgatcgcattattttcctctgctttttgcaggaaatcttcaaaaacccggaagcattctctggtggtataacggttttcctggttcacccgtaccattttctccagatctccgaaccggttcatgagcagctcattggctaccagtacatcattcggtctgtacataggtcccagaatgggcattccatagatgttgccgtcccgccgctgcagctcccacaggtcttggggcacatcccctagaaggtccgaccccgaagttttcagaagataatccagagccataagggagcccttcttaacctcctctgtataattcaaaacctcgtttccaaaccaggccagatccagccgttcgttggtggccatcttcatatcccatttttccttgtagtcatccttgtccaccagctcaaattccacctgcaccccgggcagatattgggaaagggcctggttgaacgctgcaaagacgttctcggtctccttatatttttccccgtagaccatccatttcagagtaacgtcctcctgggtgttctccggctgggcgatcgtcctgtcacggaagcaccctgcacaaagccctgcggcggccaagagccccacgcagcctattaaaaatcttcttctcatacttcccccaagggctgctggtgtacagccatccatcggatcttccccctctgtctggttacttgatccggttgaaagcttcttcctccacaagctgccgcttttgctcttctatgtattcctccacagtgattttctgcagctcctcattgtctatcacttcctgaaagtaattttctctcaggcttttcacataattttcaactggaaggagcttttcatataccatggtctcaaactcccagtattcctcctgggaaccaaaggcctggatcacattctgcacctcctgggcgttatctgtggattctattgttttctttaactcctccacatattcctgcacttcctcctgggatgcctcaaatccctctctcactgccttctggtataatgcctcggtgatcatacattgttcataggcattctccctggcctcctgctcttcctggccgctgataaggaaatactgcgttgtcatttccatttcatcctttgttatgactccataggtgccttctgcataaggctcctggtccctgccttcctttcttcgctgaaagctttcccactgggactgccccagggccctgaatgtttccgctttgtcagaagtgttttcctgggcaaaaaccaaacctgcccccaactgacctgccaatactacacacaataacaacccaattcctttcttcatacccgatacctccctgtaaagaacaaatcttcctgcacatttccgcctcccggtttccccagaaacaatgtccctgcctcacacaaaccgcaggggaagatccatggtcaccgtggttccctctccaagagtgctttccagcacaagtcctgcgtcatctcccaggatcagcttcaggcgctgtcccacatttctcacgccgatatggccttccttcagctcatagcggccctggagatcctggttgagaagctctgcctcctcctttggcatacccacaccgttgtcctgaatctggatttttacccgctctgcctgctggaataccgatatccggatcactccctgtcctcgaaggggcttgatcccatggtaaacagcattctcaataaggggctgaaggctcaccttgacaatctggcagttttccagcttttcctccaccttccattctaccttgatcttatccgcataccgaagctgcaggatttcaatgtagagcctggcatttttgatctcatccgcaatggatatgatctgctgactgttgtccaggctgatccgcagcatttctgacagattcagaatgatctgggatacctcattgtctcccttacagatggcaatggccctccaccggagattttccagggtgttgaatagaaaatggggactgatctgggcctgaagggcagtgatctgggctttgttcaccaggttcagataatcctccagctcctttcgcatctccttgttggaatagaaattccggacaatatttcccgtgatctcgtgaatctcatcctgccggaagccctgctccaaatccacctgggaatcgtacagatccggatttttcagcagattcagaatattcttcaccgggttgtagctgtagatggagataaatactgcggccagaactgacagcagaagaatcagagccagcatgagaatatagaaattccggaaatctctctggtactccttgtacttatccatgggtaccgctgacacataccgccatttaaaatccgtggagtgcaaagtggtatacaccacctccccgccctccatccgcaaagtctgggagccgctgtccttctccttgtccagcatgggatagaaggaaagctcggtccattttttcattaaatagtcctgatgggtgctgaagatcacgttgtccctgtcatccacaatgagcagggtatccgaatcctcggccgcgatctgctcatccatcttacccacgtcaatatttacaataatcccacccagaaactgcatctgggtgagacggatgggctggatataggaaaggagatagggaaagccctgtttcttctgtctgctgatcattctggcaggctcatagatacgctccgtaagattggcataccaggtcaggtcatcaaattcccccaatggcccgcctccgtcactggtgaccacatagcggcttttgctggaatacacatagatagaatcaatataatcaaaaatccccgcatacattttaatccgttccttggccagcagggtcgcctcctggctgcggctgccgtccccttcaggaaggagaaacatgcggatatcctggtccagggacatctgcccggatatctgcaccacctcattcatcagggtatccatccgctcccttgtctggttcagagagttttggctcatggtagccacctcggattcgatcacatcatccattttctgggagaccagccagataaccactgcaaaggtacacagaagcaccaatagaatgctgaaaaagttcttcaccagaatgctgttgaaccgatagtctcccagaaactgcaggagaatatttttcttcttttccttcatgattttcccgatcccttatacctgcccgctcctgcagtactctgtaggggattggccggtgtactgtttaaaaactctgcagaaatatttatcgctggtataacccacttggcggctcacctcatagaccttatattttccctccaaaagcagcttcttggcatgttccatacgcagctcgatcaggtagtctgtaaaggtcactcccatgtactggctgaacatgcggctgaaataggtgggatttagataataatggtcagccaggatttccagagacaggggctgggcataatgctttttcatgtaggcagccgccttgtcaataatgttcctggatacctcactctgcctttttcccatgatctcaatgacctgcttcagcatggccaggcagatggttttcatggtcttcttgtcagaggcttccatgatcttctggtagtccatggcctccttcacatcctgccacaggccgcctcccattttcataaacttatgggagagcatggagaacatgtccaccataaactgcttcacctgctccaatggaaaattccggaattcatagagaagattttccaccagggcctccaggccttcaaagtctccgtcactgatggtttccatgagaagacggtatttttgctgaaggcggtcatagtcctcctggaccaggcggatcttcttggcatccttctcctgaacgtgcatctgaaggttatatttatattctgccaaatccgtgatggtagggaagcaggcctctacctctgcctgaatctccagggtcagcagcatggataccgctccctttttctcctggagctggatcttcagcttctcctcaaactcctccatggaggcttcttcctttgttgtgacaatgaccttgaggatatctgaggacaggtacactggatgataggacaggccttgattatgggtaccaaaaatattgttcagcagattgtaacggtttcctctctgctggtaatacatctgggtggcatcctggttcatttccagggaaacgtccacaatggcgcagggggttctggtgctgaaatccagcagaagcagatctctcttgcgcataatgttatccttataccgcaggcctcccacaagaaggctcacccagaactgctcctgcagctcaggaaggatctcctggaattccttctccctgcccatgcgctgttctctggctttggcggattcatccagcttttccttaatgttggcgaaaacctcctggagctcatccatgtgaatgggctttaggatataatgctccacattgtattcaatggcctttctggcatactcgaattccttatagccgctgaggatcaccaccttgcagggaagctggttttcatgaatatacctggccagctccaggccggatacctccgccatctcaatatccgtcaaaaccacatccaccgggtgctccctgagatattccatggtctccttgccgtcctcaaaatctgctgccacctgaaatcccatggcactccagtcaatatagctgcacatccccgcccggatggtgtattcatcatccacgatcaccaattgatacatgttgttcccttcctctcaatccctctcccatatccgtacctttacttccagccccttggctctcatctgtcagaacggaagggtctcatccaaatattggtccacctggctctttcccaccaagatcgtgggcacaatggtcatctcttcataaggctctccctttaagatgctctccccggtgcggacagccttctggatcatctggggccagtaactcatggagaacagaatatagttttcctctgattcaatccttctgtacatttcctgggaaccggaggaacctgcgatcaccttcagattgggaaacatgcgtttctcgattccccgctccttgtactcatccagcacgtccagaattcccagggcaatctcatcatcatgggtaaaaatggcacccacacttcttcggatctctgcgggctgttttttgatccattcccggaaaatcttttttgtgtcctctctttgccatcctgtatagcccacctgtattttggggaagttctcgtggatggtctcgtcaaagccgtcagttctctggaagggcactgtggaagtatcacccataagctccagcaccactgtcccatcaggaaaataattgttaaagaatttcgctgtctctataccgatccctggattgtccccttttactgtggctgagggggcaaagtcaggaatctccctgtcaaagatcaccagagggatccccgcccgctggaccgcaatggcagcagttttcaaagaggcaccgtccatgggcagcataatgatacagtccacctcccgctccaccagttccaccacctgctgggactgttcattggaatcgttgcctgtgacacagatataatcccagtcattttcttcagccacctttttcagctcctcccgggcatagtaaagaaccccttccgcccaggaatgggtgggaccaatggtgctcactgcaatggtgatcttctcttccttggcctccctgccgcagcctgccagacaaaaagccagcaaaagcaccagcagccaagacttcctgcgtctgctcataaaaccttccccaatcccccaaaggcgcagtactgaacctaggtccagcgccgcgcctccttcttatgtcttatacaatctcatccaaagaagaaagagcgatcccctcctcctgaagagcttttctgatcttctccacaaaggccagcgccttcaccccgtccccatggacacatacggaatctgcctggatggaaatatctctgcctgttatggcggtgaccttcttctccttcaccatacggatcactctggagatggcctgatcctcatctgtgatcatggctccttctttccttctgtccaccaaagtgccatcctcttcataggctctgtccgcaaatacctcctgggcagtgcgaagtcccatgtccatggccgcgcgggccagctcaccaccggacaaggccataacgatcaactgctggtcaaactccttcactgcctggcagatagcctgggacagtttatagtccttggcagccatattgtacatagccccgtggggcttcacatgctgaagacggattcccttcgcttttgcgaatcctgccagggccccaagctgatacagggtgtaggcctttgcctcagcaggagtcacatttagatttctccttccgaatcccataagatccggaaaacctggatgggcccccacacggatgcctgcctccttggccatttccacggttttgtccatgaccacagggtctgaggcatggtagccgcaggcaacattggctgaggtgatcagagggatgatcttatcatccattccaagggtataacgtccaaagctttcccccaaatcactgttcaaatctactcgatacatatcgccgcctcctttaactgatcttcataatgctttcaataaatcctgtgtctgcctttccctcacagaaaacaggatgacgcatgatctgatactggaagtccagattggtctcaatgcccagtaccaccatttcatccagagccgagcgcattttctgaagagccgcctctctgtccggagcatggacaataaccttggcgatcatggaatcatattccgagggaatctcgtagcctgtatagagtccggtgtccacccgcacaccatttcctgccgggaggtgcagatgctgcaccactcccgggcttggcataaaattcttctccgggatctctgcattgatcctgcactcaatggcatgtccccgaagctggatatcctcctgggaaaagcttaggggctgtcccatggccacccggatctgctcaatgatcagatcggttcctgtgaccatctctgtgaccccatgctctacctgaatcctggtattcatttccatgaaatagaattttccgtgggtatccacaataaattcaatggttcccgcatttgtatagttcacggtctttgccgcaaggacagcgcatcggttcatctcctgacgggtttcctgggtgatggcaggtgagggagattcctcaataagcttctggtgatttctctggacagagcagtctctctcccccagagccaccacatggccctggctgtctgccatgatctgaatctccacatgccggggattttccacaaaccgttcaatatacatggtatcatccccaaaagcattggccgattctctctgggccatattaaactggaactcaaattcatcctcagattttgccacccgcatgcctttgccgccgcctcctgaggaggccttgatcatcaccggataaccaatctcctgagccaggcgttttcccacctctgcgtcatacaccggctccttggttccgggaactacaggcacccccgcctccatcatggtctttctggcctgggatttatttcccatcttgtcaatgacctctgcttttggcccgataaaggtaatgccattggcctcacatctgcggacaaactcgctgttttcagacagaaaaccaaaccccggatggatggcgtccgctcccatgtttctggctgctgtgataatactgtccatattcaggtaactgtttctggcaggtccttcaccgatgcagattctctggtccgccagctggacatgaaggcttttcgtatcctccttggaatacacagccacgctgcggattcccatgttccggcaggcacggatgattcggacagcaatttccccccggttggcaattaagattttattaaacacagttccaacctccttttagctcctataattttttcacacggaacaggggctgtccatattccaccttctgttcattgctcaccagaactgcctcgatctcgcagtcaaaatcgctttggatctcattcatcagcttcatggcctccaggatacatacggtctggccgtttttcaccgtatctcccaccttcacaaaggccgctgcatcaggagacggtgcggagtagaaggttccaacgatgggagctgtgatgaacagcttctcatcctcctggggctcctcagccacaggcaccaaatctcccagtccgggtgcctgggatgccatggctgctcccggtgcaaccaccgggggatgctccagcttgctcatggtgatcttcagatctccctccttgatggtaaactctgtgagagaagaatcttcaactattttcactaaacgttcaattttttctaaatccattccaacatctccttttctatttccaccgcctgtcaccaggtggccggcggttatctttctccctcagccttgggtgtgttcctggctgaacgcatttttttctattcttgatcaaaaagcttggtcagtcgttttgccaccagacggcagtccaatacctctttgcagggctggtggataatttttctcaattcatccagttccttttcttcttccagatacagccgctgggcctcctggaccgtgatggcctggaaacggatcttgtggtctgtttttctctggaccagcttgggaatgtccacggaagctacagtggctattttcccatagcctcctgtggtctgtctgtccgacagcaggataatgggttttccgtgagagggtacctgcacggagccaaaggcaattccgtctgagattatatccgatgtgtctttgggcgctatgaagggtccctccaggcggcagcccatccggtcaaaatcactggtcactgtaaattcactgtttaaaaagatctcaatgccctgcctgctgaacagctcatcctggggtcccataaccacacggagcagggcatcatcctggtcaaattcatccagatccagcttcctggacaggaaaaacggaagatagcggcgtttcatgcgaaagccgatgtagtcgtccgcctgcagctttcttcccttaaagcctccaagaccgctctttaaattggtgcagcggcttcccataacaacgggaatatccagataactggaaaaggcaatgtagcccctgctgcctgtcctggcactgccaaatttcaaaatatctcctttattcatatatatggccgtatacatgggagccggctcaccattgatggtgggctggaaatctcccccggtaatggcgatgatggttgcagaggtaaattccagggtgggtccgatgagggtgatctccaggaccgcttcgttctctggattatccagcagaaggtttgcgatcttaaaggaacgcacatccatgaccccggccacggaaaagccctggctctggtatccgttgcgccctagatcctgtacggttgtcagcattccgcttttcagtatgcgaattcccatattacacctctccttcgtggacaacacactggtattctccccggtccactaattctttaatcctgtcatattccttccggtccactggaacaaagcggatataatctcctgcctcatataaaatcggcacctctctgtccggatcataggttttcacaggggtcatgcccatgagctgccagcctcccggggaatctaagggatagattccggtctgggagcctccgatccctacacttcctgcgggaatccggattctgggatttgccagccggggcgtgtggatccgctcatccaggccgcccagataacagaagcctggcagaaaacccagcatgtagatcaggtaatcgctggaggtatggatctttatcacttcttcctgggtcattcctgcattttgagcgatattttccatatccggaccgaattcacccccgtagcacacgggaatctcgatcaccttttttctccccacgtctgccatcacatctacctttaccaggttttccatgcgctccctgatttcatcatagctgatgacacgaggatcatagttaataagaagggaacagaaggccgggatcatatccaccacaccttcaatctgctgttccttcataagctgcaccgtagccgtgatcttccggttgatctttggactgatctcctggccgaactgaaccagtatggaagaatctcctgctgtcaaaattctaatattctgcatatgtctctctcctattttttcaatccccactggaaggatccctcttcgcgcctatggagctgggagaatcctcacttattgaaaaaggtgcaaccgctgggattacaccttttgtatcattgccagccccaactccggccggaattatgcgaataaattgcttaagttggacaaggaagtgatccccaaataagcggataaaataactacaataattcctgcaaccagaagccatttgggatgacgataggtagttcccataatgtttttcttctgggaggcgatcagacagatgccaagagtgatgggaaggatcagaccattcagggctcctgccagaaccagaagcttggccggctgtcccaggatcagcatgatcagggtggaaacagcgataaatccaatgatcacccaattttcattcttctcaatgctcttatggaaggtcttcaggaaggatacggaggtataggcagctccgataatggaggtcaccgccgcacacaaaagcaccagtccaaagaagcggtagccgatctgtccggctccctgaaggaatgcatctgcggcaggattgcttccgtccagagtcacgccctttaccactactcccaacactgccaggaacaggaaaatacgcacgatggtggcgatgatcatgcctgtcacagagcttttgttgatctcttttaaattttcttcctttgtaatgcctgcatcaatgaggcggtgtgcacctgcgaaggtaatgtatccgcctacggttccgcccattaaggtcaggatcgcaggaaacaaggtggttgctcccgtggaaggcacgaaggtgtttttcactgcgtccccaagaggcggtttcaccacaatgatcactacaaagatcacaatgatcataataccgcccaataccttcgtcaaggtatccatggcagccttggcgttcttcagaaggaacaccacgatggcaatggcacctgccagcacgtagcccaccttggtgggaattcccagcagggtgttaaaaccaagagcgcctccgcctacattaccgatgttaaatacaagaccgcccagcacaatcaggaaggctacaaagtatcccagtccgggaagaagtttattggccacgtcctgcccgcgaagtccggtgacacacagaacacgccagacattcaactgtacgatggcagacaaaataacggaaatcaggattacaaagccgaagctggcctggtaatcaccggtgaattttgccgtctgtgtcaagaatcctggtccgattgctgatgtggccatgataaaagcagcacctaacaacgcacctccgccttttttcttttcgttcattttaaatcccccttctgttctttttcgttttattatactgaaaatctcataatttcacaagcttattgccaaattgttacataattttaagcatttagtaatataataccacatttccatgaaatccccgccttaagaaaccggcgccggcagcttcctgcctatgaaacgcaggcaaaaaagcagccccagaacagctctacaaactgcctggggcgaaaccctttcctatcttattttactgtccgttaaaaacctgggcaatgggggaatccgcggacatgatcacagtcttgttctctcctttcatagaattttttaatgcatccaggctgcgcacaaaggaataaaaatctgccttcccctgatctgcataagcttctgccagaatcctcatatattcctgctcgccttctgcttctaatatctctgcctgcttgtttgcctcggaaatttggatagagatctccttatccgtggtgttccggatcacctttgcctctgaatttccttccgccgtataggtagccgctatgttgtcccgctcagagatcatccgctcgtacacagccgccttgttgtcatccggcagatccagctgtttggtctcaaagagtaccacatggatgccgtactgctccatatttcccatgatggaatccataacgctctgtgacagggcgccttcacggcttgtgatcacttcgtcttgggtcatgctgctgataatgttcttcgttgcattatacacagctgtattaatacggctttccccgttttccctggaggagttcaaggtctgggcaaaggtgagaggatcctggatcctccacaggacatagctgtcactgatcattgtctttttatccttagtgatcacgtccgagggagacaggtcatacagtaacgtctccttgggcagtgtgtctgcactttcgaaaaatgggatacgcaggctcactcccggcttgtcgatcacccgctccaccttaccgaaacggcggatcagtttgtattcattctttgccgtaacagttacggaggcggccagtccaataaggatcaaggcgcctgccgcgatgacggctgctcttttctttttcatacttattcctccttgccggcatcactggacggctctgtgtcttggtacagctgggtgtcctcctgtacagcctcccctgtgaaagaatccaggggcaggattttctggacgccgtctccggtgtcaatgacgatcttcattccaggaagcacgtcctccatagcctcgtagaacattctctgcttggtcacaatgggatttttcacatattcctcatacatggcgttaaatctggccacatctgccagggcctcgttgatacgcacctgcttctgggcctgggccttctggacgatctggtctgcctgagcctgggcctccggaagcttttcatttctatatttgttggcattgttcagggccgtctcttttccctgcttggcagtctccacggccttaaaggctctcatgacctcctgggtgggcggctcggaatcctggatggaaatattcacaagctggatccccatgtcctgctcttccattttactcaatatcaattcttttatcttggcctgaatctcgccctttcctgtggtgagcacatcgtccaccgtatagctggcgatcactgtccggatgcagctctgggagacattttttaaaatggcctctggctgctctgaggcatacaggtatttcaccggatcagagatgcggtactccacaaaaaaatccacatcaataaaattgtaatcggaggtgatcatcagtccctcatgttccaccacatcattgttttccatagcatagccgatggggaagccctggatggtggtatttactttatacaccttctggagcagcggaatcttaaaatgaaggcctgtatctgttacagacttgggcacgcccattgtggacagcactgcctgctcctgctcctggatctgataagtggcatctgtggccagcaatgcgatcactgccacaccggcaataccaatgatcacccgtttcatattctttttcatttttttcgtgtccctgtttccgaaagggttgtttccctggtttccaaaggggttattaccttggttaaaattaaatctgttcacacgtctcctccttcaaggagaatacagccttccatggcagcctgtattccatctctaatagttgctgaagaaaagaaaaagacttttatcctcacacagggcttccttgggtacctgtctgaaaaataaaagtcttgctgattactacatactgcggatatctctatcggcctgacgcatatatgtaccattttaaaataaaatggacgctactcccttttcttttcttgaatggaatcataccatatatgcaccggattatcaagtactatttgttaaaatcctatcaaatcgtgaaagtattcagaaaacatttctcatttttgtgcatttacacaaacgtgaaaaactatctcccatttattcccttggtttatccacattttgtctctattttgtctctttttctaccagcttttcaacaaaatccacaatttcctccgcagcattgggattgacggtacttctttgattttccagcattttctccactgctctgggattatccaggaattttaaacagcggctgatatccttatccgcccgggtacatggaagactcatgccttttttggaaaaatacttcatgttcatagtctcgcaccctgggataggggagatgtgaaataaggggatcccagccacagccgcctctgtggaggacagacctcccggcttagaaaaaatcccgtcacaggcattcatataatccgccatctgattggtgcttttcatgatcctcacctgaggatttttctgatagtgcctgctcatggactgaaacagcttctggttatttccacagatcacaagaaaaacccggtgtgtgcctgcctgatccatatgactgagctttttcacaatggtcttaatgtcccctgcccccatgcttcctccggatacgatcacataacttttgtccggatccaagccgagcctgcccttgatctttctcttgggctccctggtgacaaagcccttccgcacgggaattcccaggggaaccagcttttctgcaggaagaccttttttggcaaactcttctgccagatcttcgttgggtactatataatagtcacagcttgtctcctctgtaaaaggaatacaggcataatctgtggccacaaacactgtgggaggcacctgcttgccgtgctgcttcatataagtaaaaatctctgctggaaataaatgaggcataaggatcacatcatagtttttctgatccagaaaccgaaccataggcttttccattctcccgttcacccggtaaactggagagaaaaacggaagttttctcaccagctctccgagacagtagataaacccaaacattctgggggatttctgcaccagctttacataagtggtacctaccccagaggccagcttttcactggtaaggctataagggtccagcatttccacaaaatgtccccttttctccagctcttccatgagagccgatccggcgctgttatgcccgccccctgtactacaggacaatattaagacttccataataaacctaccttgcacttttctttcttttcttcacttccggccagtttaccctgaataaacaggcatatgaccagaatccccaattgtatttccggctgctttataaaaaccagagccgccgcacctgttgccacataggcaaaaattgtccgatagtaatgaggggtgatccttaaaatcaaggaaaacaccaaaaagttaaaaatcaagatccccaccggcataaaataaggaagcaggcccagcagacacccaaaggagactgctattccctttcccccctgaaaccggttaaatatgggaaataagtggccgatcaccggggccgccaggataatggccgccaggagtacgctcccatcatagatttccctatgaaagtaagaatataccggaagaaatcccttcagcagatcacagaccagggtcagcattccgcacagaaaacctccgaagagaaatgcgttggcagttcccggattgtggtcaacactttcttccgtgatatcccttccgcaaaaaagtcttccaaatattctggcatagagcacacttcctgataaataacctgctgccgcataataaagtccctgcatttctttgctccttctttcttctattccctggcctttgctgacagctcttgtacctttagggcaaagacggctgtgccttccaccatttccctggtaaaatggaactctttccctgtctgatggagcataagggcattcagcccctgcattttttcctccggtgtctctagaaaggccgggactcccacgcctataatgcttttgtaggcataaccgtatgcacagggcgcctgcgcctctgtgagcctgtggccgcagtccatctcgaaggccacaggggctcccttcctgagggcctctgcttttctcccctccctggcagagtggacataaaatacatacccctcctctgtacaggcatacccgaaattcaaaggcacaagatacagccccttttcatctgccatggccaggcggatgactttgcactgctcaatgatttcttttatcttttctttttccgtaacttctctgtctgctcttcgcataattcctctctgtcttctgcgggcccctggggcaaaatcctctctgccagcataccatcctctccttccaaatgaattttctctattctaatctctgaataggaaaatgtcaaaccttcacaaccattcatctaatctcctggatactgtgatattccatccctgcagcccttaagatcctgcctgtgacctcctcagcgatcagcaccacagtctccggatgggtgaaatctgtaatatttttatcaaagagcatattggcctgggcgggatattcctcatctccatcccagaaaatatagatcacggacagactctcaaatacaggcacacgaaagctcacgtccccgtagcgttctttctcatatcccagcttttgaaccgtatcctccagaagctttaactttcctgaaaaggcccgggcaaagggctgaagcaccatcttctggtaggctgcgtcaaagatcccggctgttttcacttcccggaagggaacccattccccggctgccactgggtgttccttagaataataaagctggtgatagatgaccatgagatttccgaaatcactgtatgtttccttggtctgtgtattggtaatctccccagttttccggtcaattctgtggagctgtccaaaatattggaattccagatggttttctgtcagggcaaacccttccagcttatccgtcaccttttccagatccaaattgagaaattcctttctccatttttcacacaatacctcatactgattcatcattcgccctcctgattttcttcatagaatccttgctgcttcaactctccattccctcactcatgagggacttggcagctttgtgcgccaatgtgcagctgcaaagcagctttccttggcacattgtgtgcattccccggaggttttttattacataggaaagttcagtgaactttcctatgtaataaaaaagcgttcataaactcagcccgcagacctcccctatgaacgcttattttaccatattttcttttgaaaaacgagctggtattctgacgaaaactcctcagataagaatctcaccggtaatcccgctaagacttctcagacaagcttcccgtctcaccctttaaatccccttttcatcaaatactgctcttaaaagcagcgcatcgtccagggtatttttccatccgtaaattttcagatccacccgattctcctcagacacgggaatcccctctgcctccagaagctttttctgggtgtcgggtttttcaaaggacttggcgcctgagagaacccccttactgtttacaatgcggtgggcgggaatgtcactgacgatcctgtgacttaaggcataccccacctgtctggaattatctggttttccgcaaaggagggcgatctgtccgtatgtggctgccttcccgtaaggaatgcttctgcacacttcctctatccgcttatacatatccatttgggacctcctggagtgttcttccttctccattctttatatccggtccaccattcaatatgaagagtttatttctggttggccggctccactgccacggattttcccttgatctttgtgtggtttaccgcatccaggatttctctggcatattcccttggcacctccacaaaggtatacttatcatacatatcaatggttcctaccacttttccaggcattccgctttcacctgcaatggctcccagaatatcccctggctttgcgcggtcttttttaccaatgttgataaacagacgcaccatgcctggctctccggctccagtgtcctcaaagaggtcctcctggttgttctcttccttggctccggtacacattttcagaagggcggcggcaatgtccatgctggtaaaatcagagccgttcacctcttcctgaatggtctgaaggaaggaggtgagatcctcctgctcgatcatgcggttaacctcatctaacaccttgtcgatcttagtattggccacatcatccagagagggaacgctctgagcatagatcttggtcttgcagtaccgctggatctccttcagtttatacacttccctgccggatacaaaggagaaggaacggccgatccgtccagcacgtccggttcttcccacacgatgtacataatactcatcatcctgaggaagatcataattaaataccgcctctacttcttccacgtcgatccctctggctgccacatccgtagccaccagaatgtccgtcctgcctcttcggaagccgtccatgacccggtctctctgggcctgcttcatgtccccatgaagtcctgctgcgaaatagcctcttcccagaagtccgttcaccagcacatccacctgcttcttggtattgcagaagaccacagaaagcttgggattataaatatccaaaagtctggccaaaacctcttctttatttttcggttttacctcatagtagaactgctcaatgttgggaacggtgagttccttttttgtcaccttgatcagctctgcatccttctggaattttttcgtgatctccaggatgggagcaggcatggtggcagagaacagcacgatctgtctctcctggggtacgccctccaggatggtctctatatcctcacgaaaacccatgttcagcatctcgtctgcttcatccagcacaacggtatgcagctcatccattttcagggtttttcttctcatatggtccataacacggcccggagttccgatcacaagctgtactccgcttttcagggaacggatctgcttaacgatctcctgtcctccgtaaatgggcagtatttttatcccatgcatatagctgcccagattacggatttcctccgccacctgaatggcaagctctctggtggggcataacacgatcgcctgcagctttctgctcttcgggtctattttttccagcagggggattccaaaagccgcggtctttccggttcctgtctgtgcctggccgatcacatcccgtccggactttaccaccggaatggctttcgcctgaataggggatgcttcctcaaatcccatttttttcactgccttcattatttcggggctcagccccaaatcttcaaatctaactgtctccatatacttcctttctcaaatacaggctctttcctgttcttacttgcgtttctgtcctttgggacagatgtttccaaaccatttaaaatgcgccataggaatttctccaggtatctgtgcgcattcttccacgatgtaagggacgctttcacagcattttcccatctgccgcagagcgttcccggcggaacgctgttatataccgggcaagtgggcaagttccgtattttccatttccatatatttcaatcagaaacaaatcagagtactctcctggcatataagtaaagtccaaattttcgaactctcgcacccatgtgcgggcgtctgcggcgggtcacattggcggcatcttttagcgcctatgtgcaatccccgcgaaacttatctatttatcaggtcatattttcctgtaaaacaaacgttacagcccacagggtgacctgccgcacgcattgtgcagaatcaccaatgaacaataacaataaaaatactctttgcctgaaaacgtgcaaagagtattgacaagttcctgatgtatcataacacaggttttttcttatgtccacttattttttctcatggtacatacacctggctgcttccgttctttctggcagttttgccggtgtgcatccgtccttggaaaaaccggggtctggcccaaaggacaggccccggcattgaagaggggctaggtcctgctttacagaagatgtacggctgcaaccaggccggcgaacacgatggataccatggatgccagcttgatcagaatgttgatggacggaccggaggtgtccttaaaggggtctcccaccgtgtctcccacaacggctgccttgtgctcttcactgccttttcctcccaaagcgccctcctcaatgtacttcttggcattgtcccaggcgccgcccgcattggccatcatcacggccatgagaaaacctaccaccgtatttcctgccaatagacctgccaccccgttgggtccaagcaaaagtcccacaagaaccggggttatcactgccaccagggccggggcgatcataagcttctgggcggatctggtacacatatccacgcaggccgcatagtccggctctgcttttccctccataagccctttgatggatgcaaactgccggcgcacctccaccacaatggactgggccgcttttcccaccgcactcatggtgaaggcggcaaacaaaaagggaagcatccctcccacaaacagcccaattaaaaccacagggttggtgagagtcagatccattttaaaatccggtgcgatctgctggatctttcccacataggaagcgatcaaggccagtgccgtcagggccgcagagccaatggcaaagccctttccagtagctgccgtggtgtttccaagggagtccagggcatctgtcctggcacgaacgtggggatccatgtgggtcatctctgcgattcctcccgcattgtctgcaatgggaccataggcatccgtggccagggtaattcccagggtggacagcattccaactgcagatactcccactccgtacagacccatattaaaatctccggcgccccctgcacaaaaatagctcaccaagacagagacacctacaatgagggccggagccacagtggacagcatacccaatgacagtccgctgatgatcaccgttgccgctccagttttgctggaagcggataagtttttggttggagaataatttgccgaggtaaaatattccgtcaccaggccaatggccaccccggcgataaggccggacaacactgcaccgtaaattcccatgtggtcaggaagcagaagcttgatcacaggaaaagccaggatcacaatgagcacggcgctgatatccacgcctttgcgcagggccttcagcagattcttctgggttgccccttccttggtctttacaaagaaggttcctgccacagaggccagcacccccatcgccgccagagtcatgggaatggctacgcccttcatgccaagtccggctgccacggccagggctgcggtagagattatggagcccacgtaggattcatacagatccgctcccattccagccacatcccccacgttatctcccacattatccgcgatcacggctgggttgcggggatcatcctcgggaattccggcctccacctttcccaccaggtcagcccccacatccgccgccttggtgaaaattcctccgcccaccctggcgaaaagggccatgctggaggcccccattccaaaggtcagcatatttgccgttatctccccgatccgttctgcctccggcaatgcccggaaagcccagttcaggataaaataccatacggtgatgtcaaacagccctaaccccaccacgataaatcccatgacggacccagccgagaaggctgctttcaagccactgttcaggcttttcgatgctccataggctgttcttgcgttggccatagtggctgtgcgcattccaataaatccggacaagccggagaagaatcctcccgttaaaaatgcaaatggtgtgaaaaagcttaagaatcctgcgaatgccatgataagtaaaagaagaaatacaactgcaaagaaaatgcccacgcccatatactggcgtttcagatatgcgtttgcgcccttttggactgcctttgaaattttctgcatctcactgcttccttggggcagcttcttaacccggtgaaacatacaggctgcaaacaacagggctgccagagaactgactgccacaaaatacatagtagacataaactcacctcctatagcacaatggcttttgaattatttaattatttgtcattattataatttattatctgactttattcaatagctacggtgtatttttgtgagattttatggggtgctgtgaaaatttgtgcgccaatgtgcagctgcgaagcagcttcctgcatcccccggaggattcttctacacaaaaacagcccggaaagagaatccgactcttctttctcgggctgttctggtatcctacgttgtttttactttttttgtgctgacacgatgagcatcatgggacgcctcatttcatccagcattcccggaatttccagcatatctgaaggaggcatgggctcaatcacatgctccagctcaaatccattgatcagcagcgtattcagataggtggtcaatgtcctgtgatattttatcacaggctctcccagaaatactgcctcccgttttccttcgtaataataccggtccacgggaaaatgaaggatttttccattctcatcataataccagtcctgtgtcccgtaagaggtgaacacgggatgctccacagagaacacaaacttccctcccggcgccgtccaggaactgatcttttcaaccaagggctgaaactccttcacgtaatgaaaggccagtgagctgagcaccacatggaaggaagcctggggaaagcccagatcctccatggcacagcagcgatactggattttttcatgattgtttttctctctggccacagccagcatcttttcagagatatctgtgccaagtacatattctgcgcccttctgggcagcatacaggcagtgccatccataaccgcagcccagatccagaacacgttttcctgaaaaatcaggcagaaccttctgaagctcggaccattcccctgctccctttaatccttctttagaacgggacatttcgctgtatttcttaaaaaataaatcctcatcatatttgttttctttcattttttctttcctcccatgcaaaattatgatttccttcttctgcatgggtttatgcaattttttgttcgattatccctcctggcatctcttcaccacctcctgttatttcttagcagcgggatccttcatctgcaggatccttgaccactccttggtactttgtatccttctcctggatttcatagtctcccaccattccatccagaactgccccgtccacccattttatgtaatccttccctgtggtttcctgaagctgtgcagagggcatcccactgtgccgcccataccacacgccccacagaaaacatccaatcacaaggagcaccactgccagaacatacaaatggattttccggatataaataactcctgaagattttttcattatgattatacacctgaaacccttttatgacaatatatggagcagtccggtgtgttattctgtcctaccaaaaccttcccttgacatttccctgaaaatagactatatatcctcacaggaggacaactatgatacgacaaataatttccaattttcacctgggacagatcgcccaatccggccaatgcttccgtttgcttccaagcccggaagaaaaaaacacctatacggtcctgagcagggacaaatatctgaaaatttcccaggaccaggactgcattactttttactgcccggaagaggaatatccctactgggaacactattttgacttgaccactgactatgcttccttcatcgcctccattgacagccaggatacctatttaaaaaccgccgctgaatatggaaagggcatccgcattctccgccaggatccctgggaaatgatcatcacctttatcatctcccagcaaaagaccatcccagccatccgacgtctgacagagtccctctgccgccaatacggaagccccgtggtatcaccttttgccccggatgaccgctgtgtgtactgttttccctcaccggaacagctggatcaggcctcccttgaggatttaaaagaacttaagctgggctaccgggcaaaatacataaaaagaatctgtgaggaagtctgccagggttccctggacctggactatttaaaaaccctggacgctcttggcgccatggaatatctccagggcttttacggcattggtgaaaaagtggccagctgcatctgtcttttcggccttcaccacatcaatgcttttcccatagatacctggatgcggaaaattctcctccgggaatacgctccccgtctaaaaaccagtgacaccatcccccagacacgcctgtgccagtaccttgtaaaagaatatttttctcagtatacaggctatgcaggggtaatgcagcagtacctgttctattacgagcgggagtcttcaaaaggaaaacgcaccaaaaagaccatataagaaatataccacacccccgaagaaatgtctctgtccacgaaaaaagaagtttccagcctttggaaacttcttttttgtcttcagctattctgcactaatagtatccacaatgctcatactccgaatccttcttgcaggggcccacactgccagcaccaccgagcccacaatcactgataagatcacactcagagattttatgggcagataccaggcatccccccagcggaaagtaaccagagactcaaacaaaaatttgtttatgggaagtcccagaacacatcccagcaaaatgccgaaccctgcataggtcactgcctctgcccagaccatatgcaccagctgccggtcactcataccgatggcccgcatggccccatactgacgcattctggcagacacactcatggcaacactgtttacaatattaaatacagagatcaaggcaatcacagccagaaaaccatagataaacaatgccatggaataataagcgcccctggcctcattgtttttctgcctccggtcagaaaacacaagcgtatctccggccgccctgcggatttttgatacctcctggtccgatattcccgtggagacctgcaggtcaatgaccgcatatccctcttcacctgtaagctggcaaaacaacgcctctgaacagatgacaaccggcactccgtccatgttcttaagaggagaactggacaaaatccccgtcacctccaaattctttgttcctgaactgccctttatggtcaatctgcttcccagtttgagaggactggccttgtcatataccgcaaacacactgctcccctcccggacgcctgccgcctctccctccagaaggagatcctctgcccagtcaaactgattctcttcataagagatcagatggatcccaacctcttttccgtcagcctctgcctgcatatctaaggaggctccccttccgtatatgcgccggacgccggacaagtcctgcagctgccgcaccagctccttggaaagggtgttggaggcatcctgactacttacggacacatccggtgtatatggatttaagggggtaatggcatgccccataaagtccacggcactgctgaaggccagaaataggacaatactaaaggcaaaggaaccggccataagaatgaaatttttcctgctcccctttgcatgatgaaagcccaaagcagtttccacacgccaaaacctggtgttggccgcttttctggcctcctgaaccgttcctgcattatctgaaaccgccgtcacgggagaaacaccggacgccttcttggccggcgcccgggctgccagcaaaacggtaagaaaccccagcactgctccaaaaccaatccccagccagctcacggcaaatacaggcattccctgaaacaagccgggacttaagatcctgagtatggcacaaagtccccatatgacaatggtacccgccaaaattcccaggggtatggcacttttacaccagctaagagcctcccgccgcacaaagcggatcacttgttttttcgtggctcccaggcaccgcatcattccaaaaaactgggtcctctgggcaatgttgctgttcaggcttccagcgatcattaaaattcccgccaccatcaccagtaccgccaacgccagggcagtggcataaagctgcatcatatacggatccttgctttggaaggtaaggcccagaagctttgtgttttgtgtaacctgtttttcctccagttgaagctgggtacggatctcttccagcgtcttttggatcttgcacataggtcggaaggtcacatacaaaatgccgtccggatcctggatatcctgtgagagaaaatatttctcataggcctcccggttcaggaaaagtccaaaggcatccttgtctgtgagcatagaggtatctccggtaaatccactgacagtaaaggcaattttctccctctcaggcagcgccagttccacctggctgcccaccttcaggtccagcctttctttcatgctttttgtcacaactgcgctggctgtgtcttgtggatagcttccctccacaatggcagacactggaaacaggtcaaggaaagccggctcaaacccacagataaccgtctgtacaccgtcaacctcatagtccttatccagcccataattggaaacagaataccaggcagagtcctttacctccggccttgccttgatcacagcctcctgctcctgtgtgagcctggaaaatcccgcctgccatcctccgtcactttggactgcctgaattttctgggttcgtatctccatatctgccattccgaaaatggtggtcaccaggaaaaccgacagcataatacaaaacctggtcatccggctctgttttttatggaccttggcagaaatgggtatcaaatcaagataatgcctcatacctgtcttcctcctcccaaatccttcaggactccgtccgcaacctgcagaacacggtccgctgaggaagtcagattcacattatgggtgatcatcaacaccgtctgctgatataaccgggaggccttgcacagcagatccatcacatcctgactgttcctggtatccagatttcccgtaggctcatcggccagcaccagcatgggcctggtgatcagagcacggccaatggccactctttgctgctgccctccggaaagctgtgcgggcagatgcgtcctgcgctccgtcagtcccagaacctccaggatttcctccacctgggctttgtctggctttttgtagtccagcaaaagagggaaaataatgttctgttccacattcagctcgctgatcaaatggaaggactgaaaaataaacccaatgttctgtctgcggaatatggtccttgtgttttcctccatggaaaagaggtcctctccatccagataaatctttccctttgtgggctggtccagccctccgatacagttcagcagagtactttttcctgaaccagactctcctaccactgctgcaaattctcctttttccatggaaaaggatacattctttaatgcctccacctgggcctctccccggccatatactttgcagagattttcaacctttaaaatttccataactctgtaccatcctttcttggccctactttagcaaacctgtcttacattctcatgaatttcagcttgcgattctgtaaggaaagaaagaatgaacctggtccccctgtcgggtgtgctctgtacagacagaatccctccctgaccctccaccaccgctttggccaggggaaggcccagccccacgccctgggtatccctggcgcctgcactcctgtagaatcttttgaaaatgtgatggatgtcctccggcgagatcccacatccgttatcctccacgaaaatccgcatcatagccggggaggactcccagcgtatctggatgctgtctccctccttggtgtgatccagggcatttttcaccagattccccaatgcctcgctggtccactggaaatcacacaggatgacggcctgggatggcccctgcaaaaggatacatttcccctccccctgggctctggtccgtaactgattctctgcccgctctgccagatctgcgatgcggcagaccctcttttcaaaggaaatggcccctgcgtccaggcgcatgacctttagcagcatttggatcagctgctccatacggttcagcgattccatggattttccggcaaattccaggattgtacccggattgtccggctcctctaagataatctctgtgtacatgttcaaagccgccaggggtgttttcaactgatgggaaatatcggacactgtgttttttagaaactccttagacttgtgctctgcctggctttttgcctgaagagccatggccagctggtcaatggaggaaaatagctgatagagcgtccctgactgatttctgggcagatgggcagaaaaattcccctgcgcaaattgatctacgatagccactgcctcttggtacagccgctcccttccccgaaggaaccaaagggtcccgccccctaagatgagccacacaaggaaggctcccatacaagctgctgccaactggacccggaagctttgacccaaggtgggccacagccacacatttgtcctggaggtatgtcccacctgctccaacagcttctgccctgcctgcgtcacctgtgtgtttcccagcgtcgcagccacagtgcccggatccatcccctgctccagcagataggaggcagcggccagctccctccctgccagggcggttttcatctcccacccccacaaccaggtgagggctcccgcaaagcaaagtaaaagtccaagaaacaggcagataaacgcgaaataatccctggactgtctttcacgaaaaaagcccattacccttcctccttccattcataaccaaagccccgtaccgtgagcaaatgctctggatgggagggatcctcctcaagcttttcacgcagacgccgcacatacacagataaggtattgtcatccacaaaattcccgtttccgtcccacaaaatatccaagatccttccccgggtgagcacccggccggcatttttcaccaacaggcataaaaggcggtattctgccccggtgagctccaaagcctgtcccttccaaaaggctcttccccccatcaaatcaatggcaagggagccggaacgaagctcttcccggttttccccgttcccaaggctgcttctgcgcagcaaggcccgtatccgtgagcataattcccccagccggaagggcttggtcacataatcatcccctccgcaatccagcccccggataatattaatctcctcgtcagcggccgtaagaaagagaatgggcacatggctcccccggctgcgcaccttctcacatacctgaaaaccgcttccgtcaggcagcgtcacatccaacagcagcaggtcaaagtcctcctgtgccaaagcctgcagtgcctgtgccaccgttcggtatatttccaattgaaagccgttcttttccagggaatactttaaaccgtcaatcagacttttatcatcctccaaaagcagcagctttgccatactcgttcctcctaaattctataaaatctatgaaacttttctcacatggtctttggacttttttctattatatcatagaatacccaaaaatccgcccaggttacaaaactgtaagctgggcggattttttccctgccgtaactctcatttttcccagcctcccattggcctgccgtctctgagccattgtgtcagtttatccagatttttcactgtagaacggttgagaaaatgttcaattttctcaacctgctccagctcatctgacgtatgatttaaggtacacaaaaactggtgaagtacctcatgacggtatagcaagtatctgccagtctgctcccctttggcggtcagggaaatctccccatatttttctgcctggagataccccgcccggtccagctgctggaccatcttggtcacagaggagggctttacatgaagcagcctggataaatcccctgcttttacccccgtctgtgtgccggaaaggcgggcgatcatctcaagatagtcctccatggcactggtaagctctgcctctgtattcctttcataccccttcattgtataaaatccatccgtttccttcataatcttccccctgcctgcatctgggtttccaatggaactaaaagtccttcagacacccggccccgaatcccatgagtaaccttttcacccggcctggaataacctaaatagaaagtttccttaatctaaaatttatgtgaaagggttgtggattatgaagcagtacttcaccttaaacgacatccgtcccggccagcaggccactgtccgcacgcttctctccacagggagcatgcggcgcagactcctggatatgggcctgattgaaaatacccaggtacaatgtctgggccagagtccttccggtgacccccgcgcatttctcatccggggcgcagtggtggccatacgttccgaggactgtgagaacatactcatcaacgcccaggaaaccgaaaactcccatgacctgtgcactgcctgtgcagattctccccaaaagcggtcccctcttccctgccaggataaggttgtagccctggctggaaatccaaatgtgggaaagagcacagtgtttaacagtctcaccggaatgaagcagcacaccggaaactggcctggaaaaactgtggccagcgcccggggctattgccagacgaaaaagcattcctacatgctggtggatatccctggcacctactccctcatggcccattccgccgaggaagaggttgcccggaatttcctctgcttcggcagacctgacgcagtggtggtggtgtgcgacgccacctgcctggagcggaatctgaatctggtcctacagaccatggaaatttcttcgaaggtaattgtgtgcgtgaatctcatggacgaggccaaccgcagaaatatcaagctgaatctgcccctgctctccaaacgcttaggcgtcccggttgtagccagcgtggccagaaagaaaaagacactgcttaatctcatgtccaccctggacacagtcattgacagccctgcccagtcagagcctttgagaatcgcctaccctgcgcccattgaaactgccgtgtccatgatccagcccctccttgtccaaaagtacggcagccagatcaatccccgctggctcagcctgagacttttagaccaggatgagagcctgctccaggaggcagaagcctgcctgggagatggtttttcacaagataaggagctgcagtctgccgttgaacaggcccaggagtatctggccggggagggcattgacccggaccggatgaaggaccttctggtcagcgcccttgtgacaaaagccgaagaaatctgccagggagctgtttcctatgaaaagaaaacttaccggcgcagggatttgaaaattgaccaaatccttaccagccccaagacgggatatcccatcatgcttgccctgttggcagtgattttctggctcaccatcaccggggccaattacccctccatgctcttgtcccagggactattctgggtacaagacagactgacggacctgttccggctatttcatgcaccagactggcttcacggtgtgatggtgctgggtgtataccgagttttagcctgggtaatctctgtcatgctgcctcccatggccatcttttttcctctttttacccttctggaggatgtaggctacctgcccaggatcgcctacaacctggataaaccctttaaatgctgctgtgcatgtgggaagcaggcactgaccatgactatgggctttggctgcaatgccgccggggtagtgggctgccgcatcatagactctcccagagagcgcctcctggctgtcctcaccaacagctttgtaccctgcaacggcagatttcccaccttaattgccatccttaccatgttctttgtgggcgcctccgggaatcctggctcttccctgctctgtgctgttctgctcacggggatcatactcctaggggtggcagtcacctttggtgtcaccaagctgttatcaaaaaccattttaaagggagttccctcctcctttaccctggagctgcctccttaccggaggccacaggtgggaaaggtcattttccgttccatctttgaccggaccttattcgtcctgggccgggcagtggtcatcgccgctcctgcgggaatgcttatctggatcatggcaaatataaaaatcggaaatctgagcattctcagccactgtgcacaatttctagatcctttcgcacggcttatggggctggacggcgtgatcctcctggcctttatcctgggttttcctgccaatgaaatcgtgatccctattgtgatcatggcctacatggctcagggaagtcttgtagaattgggaagccttgtggagatgaagcagctgtttctcgcaaacggctggacctgggtgaccgccttgtgcgtcatgcttttttccctcatgcactggccctgctccaccacccttctcaccattaagaaagaaacgggaagctggaaatggaccgcattggcagcagcccttcccacggtcattggaatcggctcctgcatgattgtatccggtatcgcccggttattgggatagccacaatatataacaaaaatccatcatatctcccttcctggaagtatgatggattttctattgagttcatgacatatccgcaatctcttctcctacgtgtccaccacctggaaacggcaagctttcttcatgaaacgaaacaggctcagccgcacataagcagccaccgtctactgcacgggttcataatcaatatgggcctcttctttggtggcttccagcttaaaaatcaccggtctcagcccatcattgcagctgcagatggcaactccgggagttttaatccaatccccataataaaacacaccctctcccgctccgtgagccaatgcgaacacgtactgataaatggctttccaggcttcatcacacaatccctccggttttgcatagtccgcatagaaaacctgcccctccttcagcattggacaggcggtaagaccatcagctccatattctgcagccagctctttatcaaaggttttctttaacaccgtgattttcaccttgttcattctttctcctcctccggatgatcctctttattcttaatgtttctttaccgtttattttatatggccttttcttaaaatacaaccccaaacacctggccgctgatatccgcctacttaacagtatcctgcagccccggacagctcagcggtaaaattacaggcggtatacccatgtccacttaaaagtatcctgtcatcacagccaatgtggctttatcagcttctaccgtcatccagtatgggctgacagcatcccagcagccgttcataaatgtgaaggtcctgatccttgaacacattgaatacaactcgttccattgtgctatgctttagacactgctctacggtgtccacagcgatctgggctgccttttcattgggaaaatgaaattctcctgtggaaatacagcaaaaggccagggttttcacatgataggcttctccaaggaccatacaggacttataacaggaacgcagctttttgcagtcctcttctgtgagttctccccaaatcataggtcccacggtatgtaaaacataactgcagggcagattatatgccttcgtgatcttcgccctccccacaggctcctcatatccctggtttttcataagcctgctgcattcctcccggagctggattcctgccgctgagtgaatggcattgtcaatacatccgtgacagggcacaaaacagccaagcatttgggaattcgccgcatttacaatcgcatccactttaaggcgggtaatatctccctgccaaatggatatccggtctgcaaatttccaacgtgagccatacctctctcccaccgtgggaatttctctccaatctacaattcccttttggacagcttcctcctgaagaaattcatcctgcaccttcaaaaacttttctgatattggcccgggcatacgcacattcatcaaagaacgcaggaccaaacgcctgtcttcttttttcaccttcaaatctttatattcaatagaatcctcacacagtgcccttaccaggtaatccagccgttcctcctgaatctcactcattccactcactctaaacctttccaataccagatgtattatatttattgcgcactatttttttgagaccaactatatctcttgtgtggtatgacaccggccgccataagtaagatgatttacttctttttatctttatcatattctaatgcaacaaaccggctactacaagaatacttgaacagccggcaaaacaaacgctatgtagttgttaaaacgcattgatttccttttccagttcccggactgcatctatgactgacccaaaggtaggaacatcaccgtaaagcatatctttcattgactcataatccgcctccagagccgcaaaccggtactccgggggaatcagcttcaaagtgcctggcactgcctccgggtacttcgcccatgctctcggatagaacttcattttaaagtccaccaccttcttcagcaaatcgaggcgtgagaacgctgcttcttttacaggagtcgcagccatgcggtacaaatcataataatgcctggaataccgctggggcatttccagacgttccggcctgttggcctcatggtgcagaatcgtgactttctcccaaaaggtacgttccggtgccacagtaagaatggatgtgtctttctgttcaaaaacagccggatagtattcaccggcataaggttcaatgactgccagctttgccggtgtccatgctgccagcgcacctatttccaggcggatcacctgtaaggtagccgaattcgtaaacagattgggataggcaaagataacagtctgtttatctttctcgtctatgtaaacatttgccttgcggtcaagttcctgtgtcagtccagccttaattgtcgggcagaaaatttccgctaaaaagacctccactcgtgcgttggcctctttgttgaaagcgtcttgctttgtattggagcgtttctcccagggttcatccctgccatatcccaatatccgccagtccaggatcagatcaatatcttctgaaaagcggcagattaaatgaaatgcttttgataagctggtaccacccttaaatgtaatagcatctttccaggatgagcggcggaacagataatccagtgtaaagcacacccaaaaatccttctccacaatcgcatcgttcagccccattttatctgctgtgtttcggaataactcacgacggtcactgtctgacagtcttgccacttttctcattgtgttttttcacctccgacaatcttgcgaatggtatcacacacccaatctgtggattccgccgcctctttcagcataatatctttatctgtttcagtcagcttatcagaaagtgtgcggatgatttccggtgtaacattcgctttgccaagtgttttcaatgcttgtatgactaaactcgtcatataggaaagcccggtaatctccttattggtccggtgtttgaattcaatctttgtagaattccattcatagatcttatagggtccgtcgctgatgtaggaccataccgccgttacctgcgtagataagccaagcagattcagcgctgtattaccgcatggggcaatggtccagtgatagctccgagccagtgcttttgctaccgcctccgggtccgccgctacatactcattcagcagcttactgtattttggcttctcgtaaattccatttataatacgacgcagcaatcccgattccgtcagccttttcaaacattgcctgattgttgtggtatctgcaatatccacaaaatcagaagcgataaaaactgtcccatcctctgctgtgacgatccgttctcgaatttgtcttgtaaatccgctatccacaacgcctcctcctttcatgtcacgaatattatatacttttcgtgacaagtctgcaatagagttcctgtttttaacacgagtattcccattgaaaggagagtctatacacgtatgcgcttttaattcttccattttttgtcacgcattatacatactatccgtgacataattttatgtaccagggtgattaatctagtcgtacatcaggcaaacgcttgattcgtcctccttcggtaccagccagtaagcctatatttgtcaccaaaacgattttgaatctgttgtttccaattttatttttttgagtacctctccaatatctccattgatgcagacagatcgctctacgatctctttcggtgcaccggcttcccccaggttgacgcatatgtatcttgcctcagaattctccgcagtcattctccagaaaggaaactttataatccccggggtattcatacccacccccagctccaaaaataccaccctcttattccaatttcttctgaggaattcctcaaatctctgtgctgccttatgccaggcctggctttccacaaaagaatcgtcacatcgcaggtttacctccatctctccattacacaccgggcacctgggaatgaggctgctgggaattctgcagttcttctgctgtgccatcatggcccggacctgcgtttcgttatcatacaccttgttgtggcaggccttcttacactgaaacagtccataatcaccctgtgtggcaaaaatcctgtcttcctcaaaaccggcaagccagaattgatggtctacatttgtagtcaacacaaaataatccttacccttcaccagctccagaagccttaaatagacctgggccgccggctggtcgtaccgattgtaataaatatgcctgctccagtaggcccatttttcctcctgggtagaaaaaggataaaagcctgctgaatacatatctgtcattttatatttgtcaataaattcctgaaaatactttttaaagcggtccccgctgtaggtaagtcccgccgctgtggacagaccgctgcccgccccgatcacaactgcctctgcctcacaaagccagcttttgatcttttgtaattcctctgtacacgttccggtaagcatagttttcatccctcactttttttatgttgaaagcccgggacttacctgttgggaaagccctttcagcggccacagcctcttcctccgtgatcctgaagctttatacaagctttctgtacaatccatgccggttgcagaatgcatatagataaccatgtccccgctttgcaaaacggccttctgcgttctgctctggatacatttttattacctgggcataattggatgtcacgtaggcaaaaaatgaaacataatggattttactcatatcatgagccatggatacaaaatattccccgtcaatttcctctaccctcagctcatgacctgcactgtcattctccacttccagctccggcaggagaattccgcagcagctataggctccattgcccgtagccatgatcacattaccacacacggggcagacataaaatgctgcttttttcatgttgctggaagcgttcttattttccgcacattcacctgtaaaaagctccgccagagaaacccccagagaagctgccaattcggcaatgatccctatatccggcagaccttttcctgtctcccatttggatatggtcttgtcacttacacacagacgctctgccagctgcttttgcgtaaaattctttttttctcttaattttttaatggtatttccggtgatataactcatttctgtgcctctcttccttttttcataagccaatgataacctgcctggctgtcattcacaacctacggaacgtagagcacctgtaaaatcctaataacacagctcataggccgtatattcgtgggaaaaatgatagcctaatttttctgccaatgccacagattgtggattgtgggcatcccagcttggataaagtccccgctttagacactccaagatgagcctggccccgcatgcatatgccagaccgtttctttggcagtcctgcctggtatccacctcaatctcaatcccttctctatatcttccataggaagatgcccctgaaactacaactccgtccttgatcacaacgataccgatccccagacgctgataggtttcataatctggaaactgagacaccagatccttgctccagctctctgaccaacactgatcataaagcttctcatctatcattttcattgtatatcccggcttaagagaatctgccgcagtgtgcagcttttccaggtcaaatacagatctttctttttttatggcgtaccgttgtatccgccttaccctatctgcccagcatacttcgatcatcttctcccactcccggttctcaggcaccaggatcataaattccctggcatcctgtatggggctgtatagaacaagctctttcttgggttctcccgcaaaaaaagtaaaatcacccaagactgcccccgcagactgcggccttccttcctctgaaacataaacaacacccatcaccttctgaagacaggaccagatcaaagtctcctcccagcctttgaagagcggttctgccaagcttgtatcttcaagtttttttatcataaacgatccccctggttctgtgtttccttctgaaaaataattacttttactataccatactttccgcccaaaaccaaagaatacctccaacctggcagctgagatccgcctacttaacagtatcccgtagtttgggacagctcagcggtaaaattgcgggggatatacccacgtccacttaaagagtatcctgtcatcacagccagaggaggctttacttctttttatctttatcatattccaatgccacaaatcctgctgtaacagcaagtgccagcataatgtcctgtttacccaatgggtctgttataattgaatagattaaaaacactgtacagattatcaatattccaagtataatcccccgcacaatttttctttttttcatcgtatcactacctccatattcttcccgcgtcctttttgcacttttgttaaaatacttacaataagcaatgataatacatttgatatgacaatcctgatgatctgcaattcgtccactcctgtttccgtgatcacatgaagtgtatttccaataaagttattaaagaaatgttcgaaagctcccgcccaaagtgtacctgtcagtgcggcgcacaacccccattcataaccaaggatacctgcgagtatcacataccccacagccattaccaatgcggtggggatatcgatacttccatccactacccacacaatcacagtgataatgtgccatactccaaacagaactgcctggatgagatttgccgccctttgtgtaaagtgacgttcgccaatctgatagaacaaaccgcgaaacaatccttcctcagcccagacatttacaatattcccgatcacgcatatcccaagtgcagatatagacgcacccgtaatattctgatcagaaattgcaaagttcgatatgtagaaagaaaacgaggggctcaatcccttactttggagaatgagatactctatcaaataggaaactgtaaaagtgatcacacctaatgatatgcccaaaacagcacctggcaaaatccctgtctttttaaatccaatcccactccatgtaaaatgaaattttttaagacagaaaatgataaggccaatagtaaagagcttgcaaaagatattctcagctaaaaatgtctggtctgttttgatgatcagaaattcaaagccttttaccaattcacagatcagaaaaatccctaaaataaacagaaaatatttttttgcttcgcccttcatgatttaacccccatcatttctttcacctgactaaaaatcccatccaatgtaacggtgggtattgacattacttcattggccatcagcaatccttccactaaaaatagaatagcaaccacggcgccttgcggattgtttaaatgaaattcgtcttttgaaatgccatattcaacaagagacagcagtctggccctgcctctttgaaattgtcgggataatagttccggcccgatcccatccttgttctccagacaaaattcataaagcgctcggttgatattcggtgctgctttaccaaaatgctgtcggatgtgatcgaaatatccgtctaaaatttcaatggcggacgcttcttgtttcatgcagatttcttccctatccccttcttccttttgaagataaaataaaatgtcagtaaataattgacacttatcttcatagtgccgatacaaaccacccttactcaatccacatttttcacaaatatcctgcatggtcacttttgaatatccacattcagtaaataactcaaaagcaaccgagcggatatgctgtttcgtcgcttctcctttttttcccaatttgttacgcctcctatttgcgactatttggtcgcttttttttattatagaccagcacgtaaggggtgtcaatagggtattgcactattgacaaatccactttttaaattattttcagaaataggagctaaacataaaagcccgaccatgtgcattttcataggttttcttatgaaagaaccaaggagctatcatttactatagtcctcttttttccctttgtaaattacgcacctggaagttttatagtatccaacagatactgttttaatagccgacaagagtacccaacctcacagacagtattcctcaggaaaaacgcaatgggcgttttccacatttttttcggagctgtgtttttgtatattttgcctaattaaatcttcctataatttgggcaaaaacacttttgacatttttaaaaaaatacgatacaatttcaacgaaacgtgtagcgtgactgcgtaaatccagttaccgctgcacgtttatttttttgcaacaggaggacaagacactgaaacggagcaaggcagccggtatctgccagcccttccactttctgccgaaagtagaagcataacattacaagagacgtaatcgctccaaatccatatcttaacttctatagaaacaagtgcgtggccaaagaggcgtaaatccagcttctttggccgcgcactttttctattgcatcaattacactttatatttacaaggaggaccttttaccaatggatcagaaagcaaatacctttttagaggaacgccctatcggaagcttaatgagaaaatacgcggtaccctgtgtgatctccctgttggtagcagcgctctacaacatcgtagaccagctttttattgccaatgccagctatcttggttcctatggcaatgctgccaacactgtcgtatttcctatgacagtgatcgcattagccattgccgtaatgattggcgatggctgctgtgcctttgtcagcatctccctgggcgcagggaaaacagaggaagcacacaaaagtatcggcagtgctgtactgctgtgcatcatcagcggcttggtgctcactgccctttacttaatctttcaggaaccaattttgaccctattcggcggccgggtgaacgaagaaaccttcttccatgcaaaggaatacttcctctggatcaccgtaggtgtcccattttacatgttcgggcaggccatgaatcccattatccgttctgatggaagcccgcgttttgccatggtttccaccttggccggagctgtggtcaatatcattctggatccaattttcattttcgtatttaagtgggggatgatgggcgccgcagcagctaccgtgttgggacagatgctgacagccatcttagcgatctggtatttatgccacatgaaagccgtgaaactgaaaaaggccagctttcattttcatcccagcctggctaaaaaatacctggctctgggcattaccagctttctctcccagatctctctggtagcggcaatggcggctatcaacaatatgatccagagatacggcgctcttgaccctgtgtttggccaggcgcagtatgcccagatccccatggctgtggtgggcattgtaatgaagtttttccaaattgttatttccatcgctgtgggtatggcagcaggatgcatccctgtggtagggtacaacattggtgccggccgcaaggaccgtgtaaaaagccttttcacccgcctgctgctcactgaggctctggtgggtgctgtcgctttgctcatagtggagctgttccctcagcagctcatcaacctgtttggtgcttcaaatgagagcctttactatacccagtttgccatcaagagttttcggatttatctctgcatgatgatttttgccacggtaaacaagggaacatttatcttcctgcagtctctggggaaggcattggcttccactttaatctctcttgtgcgtgaagtggtgttcggtgtgggcttcgcactgcttctaccacatttttttggattggacggcgtactttactccatgccggtttcggatattttgacttttttcattgcagcagtgattattgcacggacctataaagagttaaccctttcggggacaaaaaggaggaaaatatgaagaatcgtatcatcaccatcagccgtgaatttggaagcggcggaagaactattggaaaaaaggctgcggagcatttgggtattccctgctatgacagcgggcttctccaagaaatcgcaagagaaagcggcttcgcagaaagctacatcaaagatgcgggagaatatactccttctggctacctttcatctattttttccaacagagcgttaggacccaccaacgaagacctcctgtgggagattcaatacaaactgattcaggatctggctgaaaaaggcccctgcgttatcgtggggcgctgtgctgactttattctgaaagaaaaagcagactgtctgcgggtatttatccatgccagcatccaatatcgatctgaacggattctaaaggtatatggggaacgggaggagtcgccggaacagcgcctccgtgacaaagacaaacgccgggcggcctatcaccgtttttacaccaatatgaaatggggatatgcggagaattaccacatttgtcttgacagtggtgaacttggcattgaaaaatgcgtggagattatttccggcctgttttaaaaaaatcaacctgcagcattccacactgctcccacccttttagcgctcattcaaaagggctatggggaagcgccccccggcttccccacaatcccacagcagaagtttttagcttccgcttgcattttgaggatctcaggtatacaattccagtatacatactaagtaacatatatatccacttagatactataggaggttttccatatggaaactacaaaaaaaatccccgaatgccctgttgaaatgacgctgcaactcatcggcgacaaatggaaggtccttataatcagagatcttcttacgggaacaaaacgatttaacgaactaaagcgttccgtcaccggaattacccaaaaggtcctcaccagccacctgcgttccatggaagcggccggcctgcttacccgcaaggtatacccagaggttcccccgaaggtagaatatacacttacagacactggctacagtctcaagcccatactggactctatggtggtttggggaaatgattataagacaaagctgactccgtaagaggatcgtagaaatgaacaagcaagtactagagattctggaaaagcaagaggccttcgaacaaaacgcatatcaatcctccaatgcactcaaggacatgatccggcatgatcttcaaaacagtgcagaaattttacaggccatcgacaaatatcataaggatttacctgagctatttcaaacaccctccctggttccattttttcacaggatacccattcctgtgcgcaaatgcgattttttccatgtatgcaaacacacacggagccagattccctatttacatacccatgacttttatgagtttatttatgtcctatatggagaatgtaaacagcatttagagtccccctatgttcccatttacctgaaaacccatcagtcctgcctgctgccgcctgggatcattcatgaaatggaacggtgccgcaaggatgatatcattttgaaattttccattcctgttcagctctatgaagaaatactttctcccatactccatgcttcttccagtgagcgtgttcttctatttgaccggcataatatgcagatggactggtgtatttatatgcttctaaaagaatataacaatcaacgggatttttataaaacatcaattaaaaactatttatcctccctttttattgagcttgtacgcaaacctgcccagcaggatcctgaaattatagtaagactgcgttctacttttgaaaaagctccctgtcagctcagtttacatggatttgcagcccaaattggttacagcgatgactatgtgggacgtgtgatcaaaaagctcacaggaaaaaccttcacggagtttgtgctggatctaaagctggccaaggccgcccgaatgcttgtggagacggaggattccattacattgatcgctgattccttaggatatgcaaatccatctggattttacaaacaattttaccgcacctatggaatgtccccctatgaataccgcaaaaccttttcataaaagataagcagggtggggaaaggaaaaggtcgtttcagaatataactcttgtttccatcttctgctataataaaagcgccaaatccatcagaaggtctggcaatttatcagcaggaggacagattcttgaaaagcagaacgaaaaatttattaacccatgacaagatcaaagagctggcaaaaatcaactttggcagctcctgtgaggtaaagaatataacagaactaaaaggcggtatgttcaacgccatttatcttatggaacgtataacagagaatgaccggatcgtcttaaaggttggtgtcatccctggaacaccattgcttacatacgaacaagacgtgatgcctacagaggtagaatgttttcgcctggcagcccagcagacaagcgtaccggttcccaaagttctggcctatgattttagcaaaaagcatatttccagcaactatttctttatgacagctatggacggagtcaccttatccagcgtttcaaaaaagatgacaccggaaaacctgtccaagatcaaagcagagcttgccggttacctgtcacagcttcatcagatcaaagggccttattatggctactttaccacagatcccaaacgtcagtttgcaacctggaaggaagcctttacacaaatgtttgcccagatcctagaggactgccataggcgccatgcacgtgtgccctatgcacgtattgaacaggctcttgcagacaactccatatatttggaggatttaaaagcgccggctcttgtggaatatgactgccatgaaggaaatatctttgtaaaaaaaatcggggaggaatataaaattgagggaattttagacttggaacgggcattctggggggatcccatcgcagatttttctgctgcttttatttttacggaggatattcgaaaagagaaagcttttctggagaggtacctaaaagtcagccctgaaattacagtctttacagatgcagatgcaaaacgttttcagctgtatcgaatgtatatcttggttatcatggctgcagagattttccgatatggatttgtatatggaaaattacaggcattatgggcaaaatacggaatcaaaaaatgtctcagggcgttggaaaaataggagccccctatggagaataaaaaccaattcatggaagagatgtccatccaaaaactcctgtggaaaatgaccattccctccatcatcggagtcatggcatacaatctctacaacttatttgacaccttgtttctctcacaaggggcaggaatgcatgcggtgggaggggtggcagtttctttcccactctttctctttctatccgccgtctcctctaccctgggtaccggagcggcatccgttatgtcccgtgcccttggacaaaaccatgtagaaaaagcctccaaaactgctgccaacacctttgtacttttttatgctgccgcaattttcgtgactgttctggggctgatttttctggatccgctgttatatgccatgggcgtcacggacaccttgctgccctatgccaggagctatacaagaattattctcctgggggctgtcaccagcacaggcttttccaacttgatccgggcagaaggagacagccgttatgccatgctgatctgggtaatcccaatgtccgcaaatatccttctggacattctgtttatttttggactgcacatgggagttgtgggcgctgctgccggaacagtggctgcccagggaatttctatgggaatgagtgcttattattttttcctgtcaggaagaagttccctgaaattccatcctaaatactttctccctgacaaaaagctttgcagggagatcatcctcatgggtattccttcttttctccagctttctggatatagcatctccattgctattgtaaatcagtttttacggtactatggaggcgacctccccataagcacctatggaattgtgagcaagatcaacacctttttcctgtttccggttatgggacttgttcagggaatgcagcccatcattggatacaatatgggcgccaaaaagccaaaacgtattagggaaacaatcctgcgggggtctgttcttgctgccgcctatggggtatgtgcctatacagtgatcttcttatttgccgctcctattctccgggtatttacacaggatgaggctgtgatcaccctgggaacctctgtactgcaggtaaccaatgccggaatcctgttttatgctttacagaatgtgcaggcagcctatttccaatccataggcaaaaagctgatttccctgttattagttctttgtaaccaagttctatgttttatccccatcacattcattcttagcaacagcttcggcttacaggggatttggctggcttttcccacagcaggcggggcggcgcttgtaatttcaacaattgccacggtttctcagttaaaggaccaaaacgggcaaggcagctctaactctcactcctgaagggctcaggcagctcctgagcccttatttttctttcttccctgtgcgctggcgcattcaaactccttcagctttgcctttgcctcctgggtcaagttctgaggaacctgaatctgtatggtcacatactgatctccatgtacattgggatttttcatggaaacaattccttttcctcttagccggatcttcgtgcctgactgtgtgccttcctttatcttacataaaacatttccgtacaatgtgcccacaaggacctcgccgccaaaaacagcggtggtaaaaggaatgttggcagtggtatacacatctgcccctctgcgttcaaagccaggcttctctgccacatttaccttcaggagcaaatccccggcttctcccccgccgcttcctggcatccccttattgcgcagccttacactttttccgttttcaatccctgcggggatgtgcacctttagagtctcaacccctgcatttcttccatttgcgctttccagttgaatgaacttatcgcagccaaaggccgcctcgtcaaaggtgatggatacctctgcatgaagatcctccccttttctggggaaggtctctctttgatagcctccgcctccaaagccgttaaaaccgtggaattcatagcctccggccctcctgttcccgaacatatccccgaataggtctccgaaaatatcatccatatttcccttttcaaaatggaattctcggtagctgccatcaggtcctgtgtgcatccctgggtcctctgcccctggctcaaaggctccgtgtccgaactggtcatacaattttcttttctccgggtcacttagaactgcataggcttctgtgacctccttaaatctctgttctgactgggagttgcctgcattttcatccggatgatacttctttgcaagcctccggtaagcttttttaattgcatttatatcggcgtcccggttaatccccagaacctcataataatctctctttgctgccattgttttcaccttctgactttttacaaatttccatccagttactacgaaatttaaaaccttccaaaagacagttgtcctggttctctgttcaaaaacatccccggaacttcttccggggaaacaactggtttttagttactatttaaagtcttaaaaaacatcctttctagccatctgttctatttgtaatataacatcagtctgttttgttgtcaatagctgcaaataaaattatttttgtattttacagggaaaatttgtaaattatgcttaagcccccagcacactcctcagtatttccctatccggaattttttcaagcattttctttcccttatttctctaaatccggtcatctatcaaaaattttctgataacctctgctgcctcttccccattggaagcaatcgcaggatgaaatcctgactggaaaatatgcatttttgctccggttaatctggccatggcctcatattcctccagaaaatccttccgcaccatctcatcgcctttacttcccatcaggagcattggtatcttcagctcctccagcggtttccaaaataatggccttttttcctgtgcacattgtagaagcgcttctgtattcctgtccacaatctgctcccagtcctccccctggcaccattcataaaaaccggctcccatttcgtcctgtttcgcttcggtacgctctttcaccaaattctctccaaaatccctgtccagggtcctcccgtcaaagctgtcggcaatcacccggtggatgagatctggccgctctaaggctgcatttatagctgcccaggcgcccccgctggttcccatgaggctgactttatcgtagtgcagatgttccaatagggcaatggtctgccttgcctcttcctgccacaaatccggcggaaacttatccaccctgtcagacctgccattccccagaaaatcaatgaggatcacgcagaagttcggggtatacaagggcaaaagcagttcaaacatcctggaagatgcggtgtccccgtgaagaaaaactactggtttgcccttcccctgccaagaataataaattttctttgaatgataatcaaaatatgacatcttgtgcctcctaatcaaatttatggtctgcctgttctttgatcagcaaggcttgtcaagcacctaagccctgcttagcgtctgaatatccaaattcccatatgtggaaacctccgtttctatttagtaccttcagtataacataaatggtaaaaaatctcatcctcacatttctacggaagaaacatttttcccagaaagtttcagtctacagccctctcctcatccgcaatatattcaaagaaatcaaaatctgcataatgcttatgcttcacccggtctgcacaggtaaggcccaccatggttcctgtaaattctccatatttgcagtactcatcagaaaatttggtggtatcaaaaattctcccgattctctcataagtactgttgtcataactccattcaaaccatgcttttcttccctcaatatacagccgcagatacaatggcctgtcctccactggaatcctggtattgagaaattccgtcttctcgccattttccagatggataatggatagggcactctgccctaaagtctcgctgtagtattttctcagattaatatagttcatattgtcataatacaagatcagtcctgcactgtgctgatggacctggggaatgaattccattttcgtggtgatccttgcatacacactggtcagcttccgtgccagaatgctcaccctgttcagggatgttctggactcctgtccccggatgcgcacataccccggcctgaccttcacatcggcaaaactctggggcattatgcggggtgcgtaataataatttcctaattcctctgcgtcaaaatcatcaaattccggcagccccggcataggaacttccggaagtgcgctctcaggcacctccagcttggccagattgctcccgtccgccatacgcagccagccatcctgtgtccacatcatcttctgaatggccgtctcccttcccaaagtgcaccgcagctccggcacaaagggtctggcacacagatgcaccagatagacctccccggtgggaagctccacatagcttccatggccagatttctgcagaacggattccgggttgaaatatttcggcttcaaatgatccggatcctgacgctcataggattctcccggtatactggtgacaatgggatttttcggatctttttcataaggtccccacacattcttggaccggcccatagtcacacaatgattataccctgtgcccccttctgcgcacatgatgtaataatactctccccttttcgtgagatgaggcgcttcaatgcagcctctgtccgttccgcccctccacattctcttgggataacccaggatttcttgtttttccggagaatattctaccatgcagatggctcccggtttttcatatccctctctggtctcccactccagggagaccacgtattttcttccgttgtcatcatggaaaatagaggcgtcaaacccagaggaatgcagatataccggcttgctccagggtccctttatatcctttgcggtaattaagtagttgtccacatcaaaataccgtgcattcatggagttcatcactccgtacaccacataaaacaattcttccttttcacagtaggtcaggcagggggcccagattcccttggcactgggaagctttttcaggtccacctgctcatcgtctgtcaaaatatgggtatataactcccagttcttcatatccttggaatgatacaccggtattcccggaaaccattcaaaggtagaaactgccacataatagtcctccccttttctgcagatacaagggtctgggttaaagcctggaaatatggggtttttaatcatattcattctcctccttctttgtgggaaaccagttaaaatccacgcatctatgagaaaatcgttctacaagccttgacaaggtcaatttactcttattctccattatataagtttctccttttcattttctccatatcccgtgcgcactgaataccttttgtttatagtcaaatattaccatataaaaaaagcctgcggtaggctcaatattctccaaataataggtcgatattatcttttacttattgcattcttagcttatacagaataaaataaagaggtaaaccccatgcttataagacctataataccccagaaacgaggaattctcatgcaggagccaaaatccaacaacacctatgaagtgattcaagtaccggaattcaccggtgtacgtttttttacctccgttgatccggggagctactttcccagccactggcacgatgcattggagatcatctacatgcaggaaggagaactgattgtaaccgtggaaaccacaaaacaccggctcaccgccggccagtgctttttggtaaacccctgtgtggtacactccaccaaatgtacctcccccaacaaggccatcgtatttcagattccagtggattttattaaaatttatatccctgaggtacagcagcttctgttttccctggatgatcccacagagaatcctatccgcaggaccaagctgaacctcttaaaacacacgctggtgcagatgcagattgccaatgacatccggccggaggggtacattctgcgctttaacagcctcctttttgaaactctgtttcaactctatcacaatttcagcgtgaaggtctttcaggcaaatattaaccagaggagcaaggaccgcagccggctggacagtgtgctgaaatatgcggcccaaaattataaccgtcccatttccattgaggaaatctcacaggtggccttcttagagcccagctacttctgtcgttttttcaagaagcatatgggcgtcacctttctggaataccaaaacgaagtgcggctctcctgcatttatcaggatttaaccactactgatgacacgctccagcagattttggagcgccatggatttaccaattacaaattgttccgcagaatgttttcccagcatttcggggccacaccctcccagattcgaaaaaggccatgagaaaataccccaaaaatattcaaaatcataagcatttcaaacaacaagacaatcgaaacaacaagtttatccctaatatccaaaaagaagcataagcccaaaaaacttctcttaatgagatactttcttggctttatgcttcttttagttttatttcttttggttttatttctttacgttttatctctttacgttttatttctttaggttcttttttttgaatttgcgtcttttactatctgccgtttttgataaaggagatcaaagattctagatcttcaaagtcatcataatccccctgaatcccatccctgtgatacacaatcccggactgctcgtttcgttccaaacaatccataagctcctgtgctccatagcgctggataaatgttcgaaatgctgatggttttaattttcccagcagccccttggtacaggtctcttcacacacatagcagccctttattcccttttcaatggagcatttccgattctcgcaccagaacctgccctggcactcatcagaatcacagccgggacatttctcattttgtgcacacagacagcaggcaagcccgcatcttgctatccctaattcacgtttcatttgtataatcctcccctcattttgttattctgttgacctccgctgtacaaaacctatttttcatttattatacatctcttccaacagaattaccatactccagcagcattccctctgccgcaagattcttcttgagccaagaggccgtttggtaaaatcctggcttgttctatatctggcggatcaagtccctgattttcagaatcatggagggcgccacagagagctcgtcaacccccatgtctacgaactgcctggtaagctgaagatctgctcccagttctccacagatacctgcccattttccgcatttatgggcgttgtccaccaccatccggatcattttcaggattgctttgtggtgaggattgtagaaatcatccagtttttcgttctgtctgtcaatggcaagggtatactgagtcaggtcattggttccgatgctgaaaaagtccacaagctgtgccagctcatcgctgatcattaccgctgccggagtctcgatcatgatcccctgctctgggatcttgtaaggaacctccttctcctttagctcctgtgccacctctttcacgatcacctgtattttctccacttcctccacagaagtgatcatgggatacatcactgctaaattcccaaatgccccagcccgcagcagagcccgaagctgggtcttaaaaatctccggctgcttcagacagatgcggatggcccgaaagcccatggcaggattctcctctttgtccaaatgaaaatagtctgcctgcttgtctgctcccatatccagggtacggatgataaccttctttccggccatggtctgtaccacctgtctgtatgcctgaaactgctcctcctctgtgggatagtcagaagcttccagatataagaattcactgcggaacagcccgatgccctctgcatcattgtgcaaaaccgctcccacatctgacacactcccgatatttgcgtaaagatgaatcttcctgccgctttttatgacagtctcttttcctttcagttcccgcagaagctgctgtttcctctcgtcctcctgaagcttttctgtcatctgatcataggtctcgtcatctgggtcaatgatcactgtgccggtgtagccgtccacgattcccatcttccccttccactcttcctttatatcaatgccgatgacagcaggaatgttcatcgttcttgccaggatggccgtgtgagagttggatgagccatgtcttgtgacaaaggccagaatcttactcttgtccatctgaacggtctcactgggagcaagatcatctgctatgaggatcaccggctcatccagatccgccatatctgtacctttccccagcagaacagataccagccgttctgaaatatccttcacatctgctgccctggcctgcatgtaagagtcctccatctgggcgaacatggatgaaaaattatcgccggtggcagccactgcatactctgcatttaagccctggtccctgatgatggtatatatggaatccagatagtcatcatcctccatcatcatctgatggacttcaaagactgccgcatgattttctcccacttcctttaatgctttttgataaatccggtcaagctgtcccaaagccactgtcttggctgcttcaaaacgcttgatctctttttctgtgtcttccacatgttctctttttacatcgtattcttttttctcataaaagaaaattctgcccaccgcaatttttccataaatggatttcccaatacactgctccatatttttctccttttcccattcacttatttcttcagaacattataaccgctattcattggcattatcccaccagatatcttcttgcatttatggggaaactcccaaaacatacattataccctcgtttccccttccaaattcctgaatatgcaaaaactgcggcagggcaggaatgataccgatccctctctctgccatgccgcagcttaaatccttatttaactgtaatgatcttatccatcatctccacactgcccgttttctccacagtgcaggactcatagtcatcgctgttggttaccagaaccgctgtggtggtgctgtaaccagcctttttaatcttttcaatatcaaatgttatgagcttctggcctttttttaccttatctccctctgcaaccagaagttcaaatccatccccattcattttcacagtgtctacacctacatggatcaggatctccatctctcccggccctgtgatgcccactgcatggcgggtgtccaccacagaggaaatctctccgtcaacaggtgcgaccacctctcctgcctggggttcaatgcccacgccgtctcccagcactccggaagcaaaggtttcatcagggatttcctctcttgggatcacctttcccttcaaaggagcatataaaactttctctatttttccctctgcttctttctctgcttcttcaaccgcctcttctggtacattcttttctccgcccgttgtctgtgttcctgcctcaggctcttctttccataccacccaagtcagagcaaaggacacggcaaaggaaactacaagaataatggcatactgccaagtatagtccagcgtgatcaaaaatcctgggattcctgtcaccccataagatgtggctccaatatggaaaactgctcccaaaagggctcccacagctccgcctgccataccacacacaaggggcttgacaaatcgtaaattcacaccgaaaatagccggctccgtaattccaagtgccgcggataaagcagaaggaatggcaatcgcctttgtcttatgatttctggcctttaaaccaaccgccagacaggcagcgccctgggcaaagttggctgctgaggcaatgggcatccagatattcagtccctctgccgctgacagcatccctgcttcaatcacattatacatatgatgaatgccgcagacaactgtaagtggatagaaggctcccatgatcatagaaccgatcccatgccccacagtgatcagccactgagcaaaatcaaggacataggtttccgctgtggaaaatatgggccctataagtccaagggtgataaatgctgttaaaagtacggtcacaagcggtgtcacaaacagatcgatcatctccgggacatgcttatgaagccatttttcaatcttgcacataagccatacggcaatgatcaccggtattacctgtccctggtatcctacctggcggatagtaaatccaaaaagattccaaacaggaatctctgatgcctccatccctgctatggaccaggcattaagcaggttgggatggatcatgatcataccgatcacagctcccagaaagatatttcctccaaatactctggccgctgaaacagcgatcagtacaggaaggaaaacaaaggccgtgtttgcaaacagatctaaaatgccataccagtcacttcctgcaaatgaggggattgcttttccaagggcttccaccagtcccatcatcaggccagaggctacgatggccggaagaatgggtacgaacacatctcccagggatttcaccatacgcttgtaaatgggctgctttgctgccgctgcagcctttacttcctctttcgtggctgccgtcataccactcactgccagaaattcctcataaactttattgactgtgcctgttccaataatgagctgaagctgtccgttactctggaacaccccttttacaccgtcaatgtcctccagttttttcatattgatcttgctgttatccacggtcaccagcctgagtcttgtggcgcagtgtgcagcacttaccaggttttcccggccgcctaaattgtcatagatctctttggcacattttttgtaatccactgccatttcccttccctctccttttccttcgctttacatcagatgatatttcataaatgcctgatagatgccatcctgctccacagacggacacacatcatctgccaactcctttaaatgctcactgccatttgacatacagatgctcaaggctgcggtctgcatcatctgggcatcattcatactgtctccaaatgccaccgtattctccagagggatatgaagatattcacagactctctccacaccttttcctttgtcaaattccttgctgatgatttcgccatttacatatccgaatttatcggtatcctggacacagaactccagctcttctcccaaaatctccctgaccttcttaagctgagatttttcccggcacatgatgaccagcttatataccggctgtccctggtactcctccatgggccggatattcagagactcttcgatctgctttctccatcggagcatttcactgttgcttccttcctttgcattttcttctaaaaattctttaaaggcctcatccgtataggagccgtccacacattccactgtgcggtatatgccgttttctttcagcacttccagggcttgctttttctgtgtctctgtgagagggcagtcataaatcacttcttggccacagcggatatacccccctgagcttgcgatgataccgtcaaaatcatactttaataatggcttcagcatatcatagtttctgcctgtacacaaaaaaacataatttcctttttccctggcctttttcaccgcctccaccgccgactggggcggctggttgctgcccggctctgtgagcgtcccgtcaatgtctaaaaaaataagtttcttatccatttatctcctcatacttataagttttcttcgaagaaatttttcatctgtgccagcaccttctcatcgtcagctgccacagtgacctgatctcctttctttgcgcccagtcccataactgccataagcttcgttgcgtcaacggtctttccgcctttgctgatggtcactgcacatcctgctgctttggccgctttcaccaaaagtccagccggtcttgcgtggatacctacctcatccttgatcacataagtaaattctgccatttcattttcctccttttttgtgttaacgattccattatagttttgttttttagtttgattctcctgttattatccatgttttatatgtggtatcgttctcatatctttattataatacactttttaaaaatgtaaattgctatagtatacaaattttaccgttcatttttatctatacttaccaaagctttcccggattttgcaaatatagtcaataaactgttccccatcccctggtcggcttcacgaatccaccattgcctgtatccccggagaacttttccaggtaacaaaaagactgccctggaatcccttgactcctggcagtcctgaatcatcatataaaatcatcttactgactggtttttgaccagatcataaccgatcttcacttctttaataaccttattggcatcctccatgcattcaataagtaattttgcagcctctttgccgctggtcttatagtgaaggcacatggtggtaagtgcaggggtgaggagtttgctcacaggggtattacccacccccgtaatctggatatcttccggtatttttttcccaatctcccgcagatacagcatggccccgctggcaatattgtctgtggcacagaatacagaatccacctccggcactttattcagcagctccttcattttctcatagccggattcaatgctgaactggcccacctgtacctggtccttttcccacttcatgtgatgttcacaaagagaagcctccacccctcgtctccggttcctgcccacagcttcgtcccgctccgtaactcctatatacccggggactctgcctttttccaacaaaagatccatgagctgcctggccgcattgtaatcatcgtggtacacacagcagcagcccttcaaatattgtcccaaaatcaccactggcacctggcattcctttagcatttttttgtgctttgccgtaaagatcgtggcaataaaaataatgccgtccacctggttttctttaaaaatacttaggtattttaattcttcatccaggttattattggtattggccagcaagagctgatatcccttcttggacagctcatcgctaattccctcaaccatacggctcactgtgtgggaattgatcttcggcagtatcactcccaccagccttgtctttttcgtccgcagggtctgggcctggttggatggctgatatccagtttcctctatgacttgtctgatcttttcttttttctcttcacttacatatcctttattcaagtaccgtgagaccgttgcccttgacacccctgccatttttgcaatttcattaatattcacaggcccattcctcctcctagcatcattttaaaacatctgccggaaaatggcaagctgcagccaagacctgccagatacaaaaaatctctctactccagaagcatgtctccgtttttgacccagccaatttttttcaggacggaattgatcaaaggacagaggatcgcgggaaggacaaaggatattaagattagtcccgcccagtccatggccgtaacgcctgccttcgttcccgccgcaacatcgctgagccagcctgtatagactccgatctgccctttttattccttcccaacacaacggcgggccattttcatttgccgggaggaacgctcccttgaaaattgtctccaagctttaatcgaatctcaatctgtgtccctgctcccttactgctgtatatattgatcgtacagctctccccaaagaaatatttcaatcgctgatacacatttgcaattccgatcctgtctgactgctcctggtcagaatcaagctttcttagcacctgctgcctctcctgctctgtcattcccaaaccgttgtcctggatggaaataatccccgtcccagtttcctcctgatattttgtctgtaccacgatctttccatttgcactgtaagtgccgatcccatggatgattgaattttctaccagtggctgtaagataaagcttgggatttcaatttgatgaaatctttcgtccagcacaaaatcaaattctatccgctccccaaaacgctgctcctgaatataaatataatttcccagcatctccatttcccgccccaaggttaccaaacgccctgagtaatccagattgtagcgaagcagctgagctgttctgtgcaaaagctccacggtgagatccgtgtcacccaaataagccgtctgtgcgatcattgtcaaggtattaaataaaaaatgaggattcatctgcaattgcagggtttttagctggctttccttgagcattgtgctgattttcaaattttccttctccttctcaagaagggcctgggtcttctgtgcgctttcttccatcatctggatatggtctttcagttggctgagcatgagattaaaggcagataccaaggtggcaacctcctcataagcaggctgctccacagccaccacctgaaattgttccagctccccatgaatcacattttttgcggcgtccgtgagggttcccaagggctttgcgatcatagccgccatattcaccccataaagcattaacaaaacaacacagatccccagaagcagcaaaagcagcagataggcagcctgtaccttttcattcagctccatctgagtgttgttggcctcattgatcagggtgacatgaagatccttatactgccatccaatagctgtataaatattgcttgcctcctcaaacaggctggaaactgcctgctgcgtatctgacagataatagtcctccttactggatatgaatttttcatggaccgcctctatcttctcctggtaataattcaccatggcctggatgtcctgcatatccctgtaaaaggtactgctgatctccatattactcagttcgtccagccttttttgcagcaggctgtcctcttcctggagctcatggtaagaagtggcatttccatattttgtatagtccttcaacgaggcataggtgtgatcaaggtgaatataaaactcgtttaaacatagaactctctccatattttggttataccgccggacagaaacagagttaaaggccagcagcagtataaaaataaaactggcagtgccaagaagcaggaagagatatctgcccaatttcccgcggattgtgtttttcatatatttttctagtatatgtgccattgaatttccacactcccctgcttattctccatctgttcttttagattctccctattaataaggagcgtctctgtatatatacaactttggggcagctcctctcccagaaaatagctgttgagcacctccactgccttcgctcccatcaaaagagaattttgctggatggttgcctccaccatctcctccttcatagcctccagggtaggttccccaaactcaaaggtaaccaccgaaagcttgcgctcctgataaagctggttttccaggagctgacagatagcaatggtgccagtgccttctgcacaaaatactcccgttatctctttattttcttccagtgctttagaaatgagatgtctggagatagatgtgctcagcttcccctccaggacagcttccactgtcatgtgagggtacttttccacaatatccttaaaaccattgatccttgcaatctggttggggtcatctagataggacgcacacaccaaaatgcttcccgcatagctgcaggcttttgccatactttctgccgccatctggcctgccagataattgtcagtccctatataacacaatcgtttttcatctctggtgtcactgtcaatgagaaccaccgggatcccccgctcctgggccatatccagtacacggttgaacttttcagaattttcaatccccactgtaataataccatccacgtctgcatagacagcactttctaaattcgagatcattttatctctgtcggatacataggagcttacacactttacatcaattccatatttttttcctgcctccatagcgccgtaaccggcccgtccccaataccctgtattcaccattggcgccacaaaggtaatcctcttttctttcttatccaccaccgtcttgccaggagacccgatcactcccagggcagcaatggcaatggcaatagtagataacagaagtgcagtcaagctttttttgtacatgatctccttatcccttctcaccgcagcagcaggtcccgcatctccccgatggtcatacctgtatttttcttaaaaaccttataaaaatatgtagatgactggtatccaatgctgttgctgatatttcgtatcactgtattttccgtttcaatcattgcaatggccttattgatcctcacacttgtcaagagctccacaaatcccgttttcagcttctgcgtgaacagcctgctcaaataaaaggagcttataccaagctgtgctgcaatatcctccagggacaaatcctgtgtgtaatttttctctatatatggaacagcctgattaatataggtcatccttccgtctgactcttcttccaaagcttctatttttttcaaaaaccccagtgctgcctccttgcgtgcctctgtctcctctaagggtgtaaatgcaagcaaaatttgatgccaggaatagatgctgtaccctatcaccaccttgctgcaatgatgaagcaataatccgatcagtacgatttcttccctttttttacagccagacttctcccagacagccagctgtccctggacaactgccgcacttttgttccactcccctgcctttaccattccggaaagtgtgcgtataaacgcttctgtactcttatggacctttgcaccactgtgtttcccctcataaaagcagatcttcccctgctctgccctgtgcacggcggcagcagcttctgtaaatgcctttgtcatctcgtcaaaatcatacctccaccggctcactccaaaacgcaggcgggcattcattttcttctccaaaagcacattatacttttcaagcagaaccgtgatccactccttgtaattctcctctcccacaacttcacctggaaaaaagaacaaaatcaacatattatcataaattttcataagaaaagtacaataatccttcagtgtgtcccctgcaatcttacgtgccctctccaactcctttattttccctgtttcctgaaaaatcccggcggcaaaaaccccgccccagtatgtatgatccatcgtctcaagccagatattcagctcttcctgacgaggcgttccaagaatgatcgatgaaattacctctctgccagcaacctcctgcatcttttgaaaggaaactgcttttttctgttcctgcagcatgctggaacgctcaagctcgatcactcgcaggatctttgacaatgctttgaccagcacttctccttttaccggctttaacaaataatccgccgctccaagtgcgattgctctctgggcatattcgaaatcgttatacgcactgcaaatgataatcttcgtacgtgcagaccgcatccgtataatttcaatcgcctctaacccattcatacccggcatattgatatccacaagaataagatccgggtcatattcttgtacacatttaattaaatctgtgccattatacacactgggcagaaccttaagatccttaaaattctcctgaagcatcatctccagccccctgcattcaatagcctcatcgtccgcaatcataattgtatacatatcgcctctccttatccattactccctggcggcttcttttatctgtcttgattataccccatatatcagattcagaaaactatcttttttcactttgatttcaatacacaatcctcttaaataccatgagtgcaaaatgtggcagttcttccctgtgaatactgcaaaaatttacctctcagcaaggatatgttgagtttataaaagcccctaaaccttatatacttatctcatcaaacatttatgtacaaggaggatataggtatgaagatcaaacgttttgtccgcacactcaccgctgctggtatggcagccgcaattctcagtgcgtctccggtgtatgcagctgacgccatgaatccccccaccacccaggtggcacagggccagctgcggggctatatggatggagacacctacacatttttaggtgtgccttatgcaagtgtttcggaaagattcgcacttcccgaagatccccaggcctgggaaggtgttcgtgacgcacaggcctacggcgctatctgccccatacctgaacagacaagtgttggcgacgacgaaatggtatggccccaccgctactggattcaaaatgaagagtgtcagtttctgaatatctggtcacaggatattgacagctctgccaaaaaaccggtcatcgtatttatgcacggcggcggctttaataatggttcctccatcgaaggcgtggcctatgaaggcaaaaatctctctgaatacggggatgtggttgtggttacccttaaccatcgtttgaatgtccttgggtatctggatctctcttcctatggagaagaatttgaaaactccgtaaaccttggggacgaggacttgatccaagctatgaaatggatcaatgaaaatatccaaaacttcggcggagacccggagaacatcaccatcatgggccagtccggcggaggaagaaaggtacagtccttccttcactatgacaaagcacagggactggtagatcgggtgatcgcacagagctcttctccttacagtctggttgacaaggagatcagtactgctgtagctgaaaaaacactggaaaatctcggccttgatgaaaattctgtagctgagatcaaaaccgttccctacagtgatctgatcaccgctggtgtggacgcactggctgctgtaaaggaagaaaagggagtatctgtttcctgggctcctgttgaaaatgaaggtgttgtctctgaagaatactgtgattgggctgctgaaatccccctgatggtgggctccacactcacagagcagaccggctccttccgtgttggggacggacgtaagaacgagtggactgacgaagaagtcctggctaatgtaacagaaaaatacggagacaaggcagaagatatcatcgctgaatttgcaaaggcttaccctgacaaaaaggctgcagatgctttcttctatggcgcttctcaccgggagaattccaaaaagatcctcaacggaaaagaagaggcgggaactgctccggtttacagctatatgttttcctatgaggctcctgtaaacggaggcaccacagccttccattgtgtggatttgatctacgccttccacaatgtggatattccggttgttaccagagcctgcggaggggatgaggatgcccacagaattcaggatcaggtagcatcagcgatcgtgaactttgccaccaccggcgaccccagcacagaaacgctggaatggaagccctatactgctgcagaacccaacactatgcgttttgatattgagagcaagtgtggagtcattgaagatgctgttctgggagagctttgtttagctgagtaacaaaactataaaaatgccctggctggaaatacattttctaatgtattcaaccggggcatttttcacctcatcttattaatacagatcataagcttatggggatttaaattcgtctgtgacccattgacaatcacatctgcatatttccagggttcctcctccaaaaacaagggcatcagtaaggagtcccaccaatcagcaaattctgtcacagactggatcgttcctccgttttctccattggcaaggtcacgctgtacaacacgggcacgggcaatttccggttctgcatccatccaaatagaataggctgcaactgcacgcagtgtgctcctgccagctcccatgccctcaatgatcagtgctctattggaatccacctgaatacatcctggacggttttccttcacccagccagttggtttatatgcagtctgcctcccttgaatccagggatttataatgccgtccagcagttcgccgtcccagtggattgggtctgcacaccagctcacatcgtctgtatgaactaaatttgcattgataagttccgaaagttttacagctaaggttgtcttgcctgagcccgccgccccatcaataagtatgaggggcttgggtgctttctttactattttctctgccagattggacagagattcttctgaccatgcgtctattttaagtgacggcagcatcgttaatgacttctccataaaaactcctttcttctcaacgtgatcctataattcctacaacagctatacaacagcctcttcccctgcaaatactttcatggccgcctcttcctcaaactgtctggaatataattcataataatatcccttctgctccagcagctccaggtgactgccttgttcaataatcttcccatcctttaccaccaatataagatctgcctgacggatggtggataagcggtgtgcgatcacaaatgaggtgtgccccttcagcagatgattcgttgcatcctgaatgagtttctctgtctgggtatcaattgaggaagtggcctcatccaaaacaaaaatggcagggtcagcaagaactgcccgggcaaatgaaattaactgcttctcccctgttgacagcagaccgccgctctcacccacatcactatcatagcctttttccattttctgaacaaccatatccgcagacacatttcttgcagcctcttcaatctcctcatcggttgcatccagacggccatatcttatattctcccgcacggttcctgaaaacagatggggattttgcagcacataaccaatctggctgtgaagccaaagctgtgaccgttcccggtaatccacaccgtcaatcaagattcttcctttcgtaggctcaaagaaccttcccaccaggttcacaagggtggattttcctgctcctgtctcccccacaatggccacattcatacctgcaggcacatgaaggttaaaatgctccagcacatattcactgccatctgggtacatgaaagaaacatcctcgaacacaatatctccccggattttttcccaattttccttattgggtgaaaaggcatccccatacttcttgagcacatggggccggtccaccacattgggcttttgctccagcagatccattacccgctcaatacttgcctggcaggagatcagatccgccagcagtctggcaagctgctgaatgggctcaaagattaccactgcataagaaataaatacagacaaggttccaagttttataatattttcctgaaccatataaccgccctttgccagcacaatggctgaagccactgagctgaaaaacaatattgccgggatgtaaactgcattgagccttgctgaatgaattgccgactcatgcatatcccatgtcttttcaaagaaacgtttttcattatccttttcgatcaccatactcttggatgtcttaactccggtaatcccttcattgtacacatttgtgatctgggaattgatccgccgtacctttcggttccatttcaggatccgattctggaaatacaccgtcagcagggcaatgcaggggacgatcaagataataataaccgcaagctgtgggttcaaaagaaacatgatcacaaacacgctcaccacataaataaaagcccagaacatatccaccaggccccatgcgatcatccccgcaattttcagcgtatcgctcatgacccgggcatggatatatcccaccggagtggtattgtaataggagaaggataaggtctgcagatggtgaaactgtgccctctttaagtccttccccacattcatttcaattgttgttgccgcatgaacggacacatacacacaaacagtctgagccacaataaccgaaatgtaaaccaaggaaaataccccaagccccttcaactggtccggtacaatgaaggtatctatggcatagctttggaacagaggcacaagaatatccactcccgcaaggagaatattcagtcccagagtagtggcaaagtactttttatatggtttgaaaaatggaagcagcttcatccatatccgaaagctaaaaggattgttatactcttgttcttcatatgctgccatcttttatccctccatcttctctctgtcatcacggctcatctgaatttcatagatcttacgatagattccattcttttgtatcagctccccgtgggttccacattcttctattttcccctgattaagcaccaggatttcatccgcccccatcaaggaggtgactctgtgggatataaggattacggttgccgccttcatatgctccttaagtgcacagcggatttcataatctgtctgggaatccactgctgacaaggaatcatcaaacaccataatgggagtctttcgaaggagcattcttgcaatggcaatacgctgcttctgtccccctgacaaggtgactccccgttcccccacaagggtgtcatacccgtccggaaaactcataatagcctcgtcgatacaggcgatctgggcggcataccgaatctcctccatggatgcatccggcacagaggcggcgatattttccctgattgtcctggagtacaaaaacggctcctgcaataccattccaatattttttctaagctcttcaagagggatatcttgaatctctctgccgccaatgcagatccttcctctgttttcttcaagttcatacagccttgtaaggagctggatcaccgtggacttcccgcttccagttccccctaaaattccaaaggtgcttccctgtggggccgtaaaagaaatgtcctgaagcacctccttatctttctcatatccaaaggacacatgctcaaaggaaatatcatatcttccgccagactcctcacgatccatctgggtttctttgttttcttttccatatgcttcttcctgagaacgaagaatataatccacacgttcaaaagaaacacctgccttactcatatctgaaagaatgcgcccaagtccccggatgggccacaccaatgttgaattataggctgcaaatgccacaaattcccccacggaaataaagccattcaccgcctccagaacaccgaaaataatgaccgcaaccacctgcagtcccgtgatcagatctccgattccccagtaaagtcctgacaacgtccccagccggatccacagctttgcaaaggcatcatttttcttatcaaaccgctccatctcaaactgttccctgccgaatgcccgaactacacgcactcctgtggcattttcctggacaaccgtggacagctctccctctgcctcatctgcggtagtaaaccgttttgcgatcaaccggtaaaaaattgcggaataccccactacaaccggcacaaacagaagtaccacacaggaaagcttcacgttcatggaaaacatcataacaaaggaggtgatcaccaaaaatgccgttcggaacacctccagaagctgcgtggcgatgaatccccggatcacctccacatcagaggtacaccgctgaataatatctcctgtctggtgtttgtcatgccatttcatgggaagcttctgcacatgaataaataatgtgtctcgtaaattttttgcaaaattctcccctgcttttgccgtattggtacggctgatataggtgaagattcctgaagctaccgcaaccaccacgatcatcaatgccaatatccaaagattcttagacagatagctgcctttttccccagcgagcacctggtcaatactgaaccggaaaatctgcggggtcagggcatttaatatggttgccatcaaggatgcggccacagcggcggcaaaatagcccttagagccttggagaaatttaaagatcatttgggacttcctatgcttagatcttacctcttttttcatgtccttgtcctattccaatcctatgatatagtttccccaggaagtcagcgcatacaagcatttacgaatttcattggaacatccatacgctgtgccacctgctctggtgtcatgccgctggctaagaaacgcttacacaccacttttatattttcccccacctcgatcatatgcccatccgggtcatagaaacgaacgacacgctgtccccatgaatgctctttcacggggtgcacatactcaacattacattctttcaatttatttgcaaaattatcaaaatcatcttcttcaaaataaatttcaaaattattccctccaaaggaaatctcacttgtaccgataaattcttcgtatgtttccagtgtctgcagcgacaaaccgctagttaatgttttgttcgctccaaaatccagaaccacatgaagtcccagcacttttttataaaattcaaccgacttatccatatccgttactaccaacatgggattttttaatttcattttccatacctcatccgattccatttattactcatgcattttaattccttggatctccgttgcgtaaattaagccgtaaccctcacgcacctaccgataacgcatcatccccatacagaactcctcaattcctttcagctgtttcacacgccgcagcttaatcttgcaagtcgcacaaatctgttccagtgccgcctctacaagaacattggaaaccctgatctcctttggtgcccccgctttaaatatgaatccaatcagcccttctgccagctctaccatgggatcttcatacggcccattcagatcacaacaaataatcaatcccgtattggcatctgtcaaaatactcatcgcaggattggcaggcttatcgtatttcttatctgtgacttgtgccatcatgggtctcacatccgcttccagcacaaatgttccttttggcacctggctcaattcctctagaagctcttcatctgtaatgataagatttccaaaattgtaacaagtaaatggcagcggttcctctccaaaatgccatgttttcttgtctgctgagtatacaaatgagaacatatttcctttctcgaaatcaataggaacgccagactccttataataagtgaatgccatctcaagattttccagatgctctgtcatccgcaggacctcatcctgattcagattatatggataatatccgggttcatgggatatgaaatataaccacttattcttaccacgatatttatatcccagctctttgatgatctccctttgcttcgctgataattcttcccgattcccccaatagcaagtcagattcttctgatttaacatggcatattccaccgacagattcatcttctcctgcatagtgagcatgagaaaggtgttaaacgcatcgtatccctcatacacagcgatgccatagcactctccgccctttcccaacacgctgtaaaacaccgtattttcaggcttttcccccactctaattccaatgagatccatatcccacagcagctgccatggctctaattttccaattctttcagccacttcgtataattttttccactcatcgatggttgcctctattctcatatgcgtccccttttttatatataatgctagtaagtcttaaacctttcaccggattgcctggctgtcaaattcataaatggttaacaaaatagttctccaccttcccacaagctacatctcgtagtatagtcattacctataatgccaaaaggcggctttaatgaagtataacagaaaaagaaagtgatttctgttatttctcattattatagtcatatatttctggtaaatttacaatttggaaaattactgcagcctataaatttaccgtgtcgaccattcctttgtcttaaaattccaccacataccgggcaaatagatggatcatactctcttttcttattttctatagctttctcttctgcctttcgtttctcttcaaactttcgtctcacttccggattattcgcgcacttcttacacattccaagatttacacgtccttttcctccatatgagctgaatgcttcttcttttcctatctctccacaaaattcgcatttgatccatcgattgccatctgcatctcttacttgagtctcctgctgtataaatccagcttccaaattgcgtttaaaatcttcttcacgctgacgaaattctgcctgacgcttttctgcaaacctctttgtctcctgttgccgccactggtgttctttttcattcttttcttgcaaattttgctgttcctgtcttttacgttcaccttcttccaaacgtttcttttctttttctgctcgttcagcctgttccttttgcagtttctgataaaactcctgctttctgtgagcctgctttgtggcaagcgattcatttctaaacaatacttgtctgtcactgccaatggaaaactctcttagctttccctcagcaatggtaagttcccaccacaatccctcagaatcctgtacataaaacacagcccgcataacagcctgtgtataatctgcctcctggacttctaataataaacagtacccctgcctgttttgtactttcatcaacccctccgggtactgcttgttatttcctccattatttctgtcaactatataaataacctgaatccctttactgttgctttctagtatttccattttctcatctgacagatttgccctttcatagctataacttaaagccactcctttttctaaagttaaaaatgaaaactcgtattttttcgtaatatcatccacagcatgaatcggaacacgggtttctatgtcagaaacttccagcttatcatcgagccagcacttcaaaacaatttttgaggcaacagatatctttccctcggttagcatatgacaattgtggttaaaggcaccatcttttaatctaaaatgctgctctctcaggttcctgtctcctgctacaagtataagattggcaccacatccacaaggacaaaataattcattatttcgactcttttctctgagttctttcaatttttccggaatattaatctgcctgcccttaatgaccgtatagattgtttctattcctatatactttccatcacataaacacactgttctctgagccatacaatcacttctacctttcagtttacaaatgacttatgaactatcactcaacatccaaagcaccttgcgttttactataagtctgcccgccacagtccagaacagaacaagtccctctctattttctctctaggcagtcctatgtcttttccccttcgcctttaccattcgtcctcccttatctattcgggcatcagaaggaggattgttgcatcactcaccaaacaatcctgacatatcaaacaggacatcatcgggcatacacaatttgtattttgaagcaaattcttctatgaattcatcggttggttccttgtgctttagatattctttctcaagtacagtttttacttcctggcgctttaattcagcctcctctgccttcacatagataatcccatacatacagccataggatacatatatttcatacgggcccttctgtgatgaaaataagctcacttctacttgttcgtcatacacttcatctatttccagataacaatccttataatatctttccacttcagaaaatagttctgttacatttctccaggtcttcatctttttataccttcctgttttttaaattgcacctggtagtgcataatcataggtcattatcacacaccttataattttctatctttccctaagcattacatacattttcttttttctcatgccccagcaggtcaatagactcatggtgcaactcgctcagcattggttaacagtcacacattgtctttccttctcctgccaatccttcaaaatcacgtacaaaatcatcaattgcagatgtaatcgactggtttttcaccaatccttcaattacatccggcgaaatggtagcggctccgatcccatactgacacagctctaacacttgctgtgaattcttaaaactggcggccagcacctctgtctgaagatggttgtttctgaaaatatcatggatcatctttgctgtctgtattccgttatagcccatgttatcaatccgattaatatagggggctgcataggccgcgccacattttgccgcaagaaatgcctgcattggcgtataaatggccgttgccgtaagaggaattccttctttgtgaagtgctttcattgctttaaagccttctgggatggatggtatttttacataagtatttttccccagctcctgtacaatacggtgcgcatcttccaacattccttctgctgtctttgccacagcctgtacatgcaattctgcgtcttcccctatataggcacggatttctttcaacacctcataaggtggtctcttacttttcgctaaaatggatgggttggtggtaacaccatctaccgggtaaaattcataaactctcttaatcgcttctatatctgcatgatcgatcatcaatttcataattccaatctccttttcagtatggacggccgccaggggcaccagcttatcatttatggagaatgagaaattcaataggcatggcgttacccctctgaatcttactaactatctccgcacaagaaacatagacgaaaatattcatctcctcctgcattataaccctttcttcatccgcatgcgctccggcattacattcatcggattgcaggaggtatctggctgttttccatccatcagatccttataaaactgtactttataatctacaatttccagacgcttcttcatggcttccaaagcttcctcaatctttgccttttgggctgccatcatttgataccgctgaggaatcgtgctgtctccctgcttacacaaatcaccataatgcctgatctctgacagcggcatatcagttttgcgcagcccctgaaccagctgaacccacagcaggtcctcatccgtaaacagacgctccccattttttcctctcgtaacatagggaaacaggccttccttgtcataatatcgaattgtatgcgccgatatattcagcatttctgaaacttcttttactgtatacatttccacttacctcaaaaaaaagcttgactgagagtaactctaatcctttatgattataacataagaaagaaactcaaaacaagtccacgaagtattttaaggaggttcaagatgaaagtattattgttaaatggaagtcccaatgaaaaaggctgcacattcacagctttgcaggaggtggaaaatgcactgaacaggcaagacattgaaacggaaatattctggctgggcaagaaggccatctctggctgtattgcctgtaataaatgccaggaaacaggatattgctgtatggatgacaaggtaaacgaactgctgaaaaagctgccctccattgacggcattgtgattggctctcccgtgtactatggctctgcggccggacagttgaccgcatttttggaccgggcgtttcaggccggattctggaaaagcagatgggcaaatatttttggcgcggctgttgtttcctgccgccggggaggggcatctgcagccttcgaccagctgaacaaatattttctgatgaatcagatgcctgtagtatcctcccaatattggaatcaagtacacggaatgacacctgaggatgttaagcaggatctggagggactgcagaccatgcgggttttggcaaatcatatggcctggctgctgaaaagcgtggaagcaggcagaaatgcctacgttcccataccacagaccgaggagcgcatattcacaaactttattcattaagaatcccataccgagatatctaatagaactccggaaaccggacttaaaaaacagttccggcttccggaaattccttgctttccttcccttttgtttccacccactcccggaaaattcacagaataccactctatcttatatagattgtgtgtagattgtgtcttggcttcatgtctgtaaggcatgccaatccctcgtacccgccactgccgttaatctggttattggtgattcatctcttcacttatagaggcaggggcacaatcacttatatggctaacgtaggtctatttttttatataagcttcatctgattcaggaattccagcttggtcagatatatatcgttcaactttcatcttcaaattgtatttttcccgaagttttataatttcctccatcatagacgaagcatgatgaacatctatagaatgctgatccttccagctgtcaattaataatacagtttcctcatcctccattggaaagaaatactcatatctgatatttccatcctctgcacgaatgtcccttacaattcccctggaaatcatttcctcggcaaatttcctggcgcatccatttgacccggtataataaatattaattgtgatggccatcactttatcctccattaaatcttacattttcaaacaaatagcaaatttgagatcttcatcacgtattttatatgtatcgttccacaaaatactactttacgcaatcaaagcttattctgattcgttctctgagttcttcatctgtgatgcttccatcaagacagatggtataccagtgctttttattcatgtgataggctttaaaatattttttttcgtctacatatcttgcaatattttcaggcgtgtcttttaaatccataatctcaatattgccatgccccaaaaggccaatcttacctttatctactgtcatgatcagggcaaaccatttttcattctctttcctgcgaaaagccgcatagtttggatatctatcccataaaaattcaggttcgacattataatgcgttttcatatgggaaagtattcttttggtttgttcccctttgagaatttctgtatgaaaacattgatttgaaatatccagcaataccttttcgcaggcacttcgaatttcgcccacaaaaccgcccgacgcattttccacatggacaagtacatactcctcattggtatctgcctcataaaccttatactgcacccctccatttttctcgatggtcacaattacgtagaactgttttttcattataggaaatcgcttcttataggtatcaccggacagctcaaatccactatggatgagcttttcacgatcaggaattttaaatctgaaaatcgcttctatatctatcatatatcctccctcacaagtcaaattcccagcatagcaaacggaaatcaattacccttgtgcttttctccccactcgcacaattgatcaagaaccaccataagggactccccacgttctgttaaactatactctactttagggggaatctggggataaatttccttatggacaagaccatctctttccagctccttcatgttctgactcaaagtcttatcagagattttctttaaatatctctgtaattcgttaaaacgaacggttttatactccatgagacaataaaggatgatcattttatattttccagaaatcagcgacaacgtataactaaaccctgtatcctcaaaattagcattttcaatataattgcttatcatctcttactttcctccaggtaagtacctaatattaaagatggtacttgtttttcattcgtaacctattataatataaatcaacaggaatgtgcaagatacatcctgtaattcatattgatggaggtatttaattatgaaaaaaagcttaggtgtgcacccgtatctgtttccaatgcctgtactgatgatttccacatataacgaagatggttctgtagatgttatgaatatggcttggggcggaatctgcgcagaaaatatggtatccttaaatattggggaagaccacaaaacatctgcaaatattaaaaaccgaaaagcctttacactgagcattgctgacattccccatatagaagccgcagatttcttcggaatcgccaccggaaataaaatgaaagacaaattcgagcgcagcggcctcactgcagtaaaaagtgataaggttgatgccccaatcgtcactgaatttcccgtcaccctggaatgtaaagtgacagaatgcaaagaggaaagctatggatttcatgttttaggggagatcgtaaatgtccttgctgacgaatccgttctagatcccaatggaaaggttgacccgtcaaagctccaggcctttgtatttgaccagttccaaaatggatattatgccattggtgaaaaagtagggcaggcatggaaaacaggagttcccctgatgaaataatttttattcctgacagaattggagtcatttctcctaattcgagaatgactccaatgattttcatctgcttatctttaattcaataataatattccctattcaggagtaagttctgctacttgctcctgttaaaaacgtatcctttatatttaaaaaaattcatccctcatataacttttctacttttgattattatgccgcatttctataactgcttatgatttttgacaaactcataagcaaaatctactgcctggcaagttaatttctcacacaaatgaggcggatcatttggtgcaaacccgtttgggcgcaagtcatagcaccttaatgatccgaattgtttatggaacgcatctgcatattcatagcaaagtgaagtaactgtcacttcatctttgccaagaaaagtaaaataaatccctatgaacatgagtccaccttccactaatccgcactgcgcccgaaaaccgcctgctccgtgcaagccaatagcagaactcaatgtttgggcatcaagttcaatattaaataattctcccaagcatatcagtattgttcttgcacaatttatatcctctttccaatataactcatgtaccttttcctgtatgtaatttttcatcacaaatcaaaatacttctggaattccgccggatgtggaatctgctgcagctcccggcactcttcccgcttattcttcagccaaatatcaatgagccgctgggggaagacacctcctgcagtcaaatactcgtgatccttttccaaagcagagagcgcctcatccagcgtcttgggaagggattgtatttttgccttctcctcctcgggcagatcgtacagattacagtcatagggtccccagccatgcgtttccgggtcgatctggttcttgatcccatccaggcctgccattaagatggccgcgtaggcatagtaaggattggctgtagcgtccggattgcgcagctcaaaccgttttgcctccggtgtctttgcataagcaggaatgcggatcactgcgctgcggttggaggtagcgtatccaatggtcacaggcgcttcatatccgggcacaagccgtttgaaggagttggtggatgggttggtaaatgcacatagggacggtacatgctgcagcaggccaccaataaaatagtgagccgtcctgcttaatccggaatatccgttctcatcatagaagattggtttcccatccttcatcagcagcatatggacgtgcattccattgccagcttctttgtaaatgggttttggcataaaggtagctgttctcccatctttaatagccgcattgtggatgacatatttgatgatcatggtcttatctgccatatccaccatatctcctaactccacctcgatttccatctgcccggagccgcccacctcatggtggtggtatttcacatccacaccccagtcctggagcatgatgcacatcttactcctcagattataggccgtatcctggggtgcggcaacgtggtatcctccgctgccaggcacacaaaagcccttgttgtcagcagcttcccgtccactgttccaggccgcctgcctggtatccacagtaaatgccatacgctggggctgtaccgtatagcttacattgtcaaggagatgaaactcgaattccggtccgatcaacatccggtctgcaatcccctggtccttcatatactgaatggcccgcagacttacattcctgggatactggtcaaaaggccggttctcttttccgatcacacacacatccccgcacatagtcagcgtgggaatgtccgtaaacggatccactaccgctgttgccggatccggtataaagaccatatcactcttctccacaggtgcatacccataattggaaccgtcaaaaccaatccccacagtaaaaatatcctcgtgaaaccgctccactggaatagtaatgtgcctccagcgtccatttagatccgtcatcttgaaatcaatcatccgaattcctttttcctggcagatccgtaatatctctgtgctccttgccataatttcccctccaattccatgtaatggtagatttgttttgctatgctaattttaccacagtttgaaagggtttggggaatatataacataaaaaaatatgggttctgccatgtggtgaaattccacctggcaaaacccaagacttttcatatataaaacctagaatcctctactgagaccgctgctttctatcacatacctactatttttcttattgtatttgctgttcgaattgtaatcttgtcactcgcctttaaactggccgtttttgaccaccaatttgtcttctgatagtccttccggatacatgtaacgtgaaaaagatggttgtcgttagccctcttttttttgggcaaagatttggggacggtaccgctcgtttgagcggtaccgtccccttatggtgagcgatctatttcccaatatcctcctgcttttatcaggaaatggtaatttttgttgcgttggactgctgggaccagcggccgaagatcttttgtttctctttgtttgtaatataggcccgcacaccgaaataataggttcctttggccaggttaatagaattttagcatactggtattttttgtcaattaaaagatatagatttcgtttggatttcctggggtcttccatatcactgcttccagggatggtacgggaaattccgggtgaaacgctttcttacacatgaacctgtgctcaccgttttccttaaccctaagtgatgagcagaacctctctgcaaattcatccacagtcttcttagctgtcatatttgtatggcaaaccaggcgccgatactgttcgctctatgtcctattgttttaaagtacatctgcatgtggcacagaaccgacttcaactctggtacaacgcaccatggggtatatctgcccctttcctactccccctccccatgctccggcagatcaatgcttaaaacctgccagcccttggcaccggctattcccgcaaaggactccgctttctccttaaatccaagttttccatgaataaataaaaaacactttccggaagcctcttcatagagaactgccggaatcttacctatcattaattttctattttccatcctatcctcctaaaacttaaaatcccccttgtgcgtaattttcattttatggttcttcgaatatggataagctctaaaacatccctataaacacaatcatcggaacacacatcgatcatcagccatctctgtttgttcccctctttcgtagcctggtacagatcctgaatttctttggataaatgcggcagcaggttttccacgcactccttctctttcttgcccaccacaactaaaactgtaaaatatccttttttcggataaacaacacacagagacttaccagcctttcgaaacttcacattccaaccctgcgcccagacatccttgctatattcaattttacggattgccttgtactccgtatccatgtactcacaaaactggtaaaataacggcaaaccaatataagctcctatttcccctatggatggagcatggctttgatcctttctatcaatcattccagtctcccctgcttccaattcatcccttcgtgtgtattcacattcactacactgtgcatcatgaattgaaataattcctccgcattttgggcaggtatatttctctttttgctgcgccagaaatcctgccattccctgttcttttaccatctggctgttttccatcaggctggcatggtaacgggtattatagcttttttccaggctttttatctgcttacagggatattgggaacattcaaaacaatacgtaatctgccgatccgccacacaatcctttatcctgcatgttctgcaatgctccggttttccctgatcgctttccaagcatcctgcacatggctttttgtgatagcagtgcttatagcaaaccagacagttcatcccacaaggggcaaacatggcaggctcaattttttcaggcatcctcatttccactcactcctattatcaatcttccatctaaaagtatggtattccttttctcgccgaaaaaaataatacggtacctgttgtgtaggtttcgatatcagtaaatccagccgcttcaaaaaagaatcgaatttccttttggctgtacaccctcacgtcacctgtttttgtaaatagaaataccaccgtattggcaagccaccgaaccattggagaaaaaaacggttcggccatgaatactttcccgttctgttttaatacccgcatacattcattggcaaaggtctggggcgtctcaaagtgatggaatgcacaagacacagttatgacttccatactttcattctcaaatccgagaggagtgcagggacttactgtaaatgtacaggccggatatctttttctggcggcagcgatcatattttcagaaatatctacaccaaaagcattaacttccgccttcttggaaagttctcccagaagatacccgtttccgcaggcaacgtccagaatgttgtctccgtccctgagcacagcctttttgattatctcttctttatggggtcttgtataattgccctctggggcagaatcatagtcccatgccatctcattatatactttttgcgactgttctgtctttttccccaaatccatccctccgaaattctatttgctggtggattcagtttactacatttgagggaaaccgtccattattagaataggctttggggactaaaagaattttccgatgttagttttgccatggagcatacttttttgatagatagcattcattttggacaaacagtaaaggttttgccggattataattctgcccggcaaaaccctcattttcaaactccccagccttatcccctccccagttgaacggaaatttatctatgttacctttgaaaaaaacgaggctcttacgagcctcgccgtgtttttctctaaaagatttgaagattaacggaatttctatccacaaggctcttacgagcctcgccatcactttttctactggtgttacatcacttataaatttctatccacaagactcttacgagcctcgccttctgtcattttctcccagtctgacttttcacgatttctatccacaagactcttacgagcctcgccgtgaagtcaaaataataccattatccagatacaatttctatccacaagactcttacgagcctcgccagcaaactttcccaactttagagcactacagcttcatatttttatctattttatccaatttctaatttaaagcttatagtcatctcaaaagtctttcttaatttccttcaaaacttggtgcgaatctcacagaaattcatgttcgctttggattcgcactgacggatccactcccttcggttatttatagcatcaaaaacttatccatctggctctcccatgatacttcaaaatgataagcttttcccttattagtccgcccatagcaagaggcaactcatcttttctgcaccgctccattcgctaaaaatagctttaccgctcacgttaatcgctcaccataaacagacttttaaaaatataacaacagcttataaaattccaaaaaaccaagttataattcctcttgttgtaaaacgcctgccatatatcccagaaaagaatcataaggcagcgtccaccgataaacatcttccgcaatttgttttgcctgccatctctccaggttccttttgtggatggatacggagtatttctgcacttcccgccaatttccatgcccctggctgatctgttctgctaattcagacttcacaatcaccggtattgtatcactttcaattacacgaaaacggtcatttactgtctcaaagttcaactcttcctctgcttctaacagttcctgcatctcttttttctcaagcttgcctctgtgcagttcatctctgatagattttacactcagttctggtgtaatctccatcccatcctgtaaatattcttccagaagtcccgcgcttattttaagccctggatgtgtcgtcaaccttgtatcatcctgcatacgaaaactccacatctctgcatattcataagatccgtttctattgatcttatctgctgcctgaagcagtgacaaaacagaggcgatctctcgaaatcccattggaaatgaaaaatctaagccggcctccacacatgacgttgctactaatacccaatttgtatccttagcattatccagccttctttttacctcttccattgttttggatcggtcttccggtgttagtgctgtagaaagatgcactacacactcccttccaaacttttttcggatatcatccgcaatcacagctgcgttctgtactgtattcatgataacaatccttggtcccggctttgccataacccattccaccaatgactcccggctctgcggccttggtttccagaaaaacccaactcgatttctctcatatttaagcaaagctgccgccagatttccagaaatcatctctggtacctgctttttctccattccaattaattcagagattttccaaaaacgtacctgtgaccctgaggccagaatccagctgcatccccactcttcttctaacgttttcatccaatgccacgcaagtggaagcagtttcagcggcaatgcagcatgcgtttcatccacaaataaaatgcttcccggcaattcgtgcaaacggcgcagtgtcgctggacgatttgaagacaacgtttcaaaaaaagctacagccgtggtaacaatgatgggcgctctccataaggaagtcagatagcgcgtatccctgttttcaaaatccgccttataatgcagttctgccacgactgcttccgggtcttctcctggcagtaccaatgcttcccgatacacttctactgtctgtgtgatgatattggtatatggcagtaccacaaaaatccgcctggccccacttgcaatagcctgctttaactgataagccataacagccgtagtttttccgaaccccacaggaccattgtttgaaataataccagcctcatacctacactcccggcactccttatacatttgtgtgcgcagttcatttcttttgctcacatgtcctccccgaggtctgggcacataacggtccaaagcctgaagacgaagttctggttgtagttccggcatattttcctgctggggatagtttccataaacagcagcagtatccgaatgatctgcatctgccagacaggaaaacaccattctgaaaaacatcgcaggatctccctcacaatattccggtacatgctggaaattttgcggaatcaaagacctatggagccaaagcaaatgcttcagctcctgatcaacataatttcttaccttttcacgcttatcacggtaacatgccgcctctgttcttatactttctgctgcattatctggtaaacctttatggtgggcatatacaagtacttgggagcacaaagtctctttccctttttgtttcagaaatgccacacccgcatctacgtgattcaccgctaaatgctttctcttttcactgtccttatgaagcagcttctggttctcctcattcagcttgcccaaatcatgatattgtgaagccagctgtaaaatattacctatctgtgccgcatcctttttacagtacggttctatctcctttgcaaagcgcagtgccagtttcgtcacattcttcacatggctggcataactttgcgccgaatatccattttttgcactgtgcgcaagatatgattccatcacaagcacatcagatctgatacacttgccactttcgtcagcagctcttccggcaactgtgttttgtccctataatcgctccaattctccgatggctctgagacattccctacacgttccggtgtcagtgcatccagaagcatatagtccgggcagcttcccaataaatttttatgctcaatgtaccatgcatgacgcaggcgcacatccggccggatcgcagaacggttcatatcatatgcgtgagggatcaaaagcttaagcagctggatatcatctgctgtacatccactttttctggcatagtttggattaatgaaaaacggcatgcagtaaacaccgtgctcaactacccgaaatgccagcggagccatacctgcattttttcctacctgcacccctgccttgttggtgtatgtctgccgtatgatatttacaggagaaattgaaatgcccacactaaactgcgcaacgcctgtcttgatatagcccttattcccctccctctccaaaaatgtattgccgaacaccctggcatcccaatattttctcacaaactcgctttccaaaaatttctcctgtgaaaaatcggccagctttccgccagaagtcatttccttggtgatggtactacggtcacgccctctgtgttccaaaatctggtaacgatctgcgtttaacctaaatttttccggcagactttcgaaaaagggagatgcagggtcctccagcaaatctctcaccttacgtttaaaggacaccggtgaaatctccccacagccattgggtctctgacgtggatcggcttccctgtccggatccccatttgcattggaattcaccacttcaattactagtaaccctgttgctcttttcatttcttcagccactttgatttcctccatccttatcttttattcttgagagtcatcctttgtttcatctacggtatttgaaatcagctctccatcctgctggtccgctgcttttccaactttcgaatattccgctagatatcctataaaatactgagctttttcttcttcattaaaacgtgtctgacttccccaggctgaatagagcttcgttgcaatattttcatacaaagaaagataccagccagcacgccagctctcctcgccctttttcagtatccctttccaccgataactttttgcccattcaatataggggatcatccgctgtcccaaaactgccagcgttttatatggctgttcagctcctgccacatataagccgccccctgccagagcattgggcacatcgttatcccgtacgaccttacagtacatttcatgcagatcatctgatactttcagcatctgcccgaataaatatggaaattcctgcatataattctcctttctggtaccaagctggtacaaaagcaatcccatcagcgccagcgtattctgtgtctgacgcagcaacataatttgcgaacgattgtaaccctttctggcaatcttcgactttccaagatacagccccagatttatcacattattcatcagtataaccaaatcccggcgcactgccggcaattccaatccgaacaataactccattccatgataagggggaactggcttaaacttatctgtggagagtgttccatcctgcctccaaattcgatttaaaatattggaaacctccaatggaaacagtgtcgccggctgtccaaagaaaaaccggggcagattccggcatcccagggaccattgctcactgcaatgttcaatctctgccggagaagtgttatatgtataaaccacctttgttctggctttatctaattttcgtaaaacaaaatattgaatgcgtccagccatgggatctgtgcccggctgttttgttttacacagctcattaataaattcctttgctgcagtttcaaactccgattttttgctgattttatctttttcatccacatctgccttatcatccggcttgctccgccgcttgcaaaagcccaacatactgcacctgttttctcgtaaggtctccgggtatgcaaaaagtgcctcgtctttatccgtactaatccaagtaatttccttatgttctgcatcactcatccatgccagagcggactgcagcttaaaacgcatttctttggaaataggataggtggcattttcaattcttccataacggctttgacatggctgcccccggaacatggtcctcagggaaacctcaaaaccggccgcaagcttcactgtgggcatcggctcttcaaagggcacaaacgcctgtccaaatgcatccatttcttttcctgctgtttccttcttttcctctgaatccgtttccagcaatttctgattcagcatgtttgtgaagctggccgctgccactgacaatccctggttaatcagctttctgcagtccagaaccacagataatgtaccataatcttcttccacacttttctttgctttttctgaataaaacaaaatttgaagtgccaacgcaattccttttttttgctcaagcattgcaaaagcggcttgtgcaagttctctatgcaattggtctggatctgcaaagacttctatttcctggataagctgttcaaaagccgggaactgaattccagttttttcaaatagtcctgccatctctctgggtacatcctgcatgctaatgcgatacttgtttctaaatttttttccccagttatttgttctgcaaagctcacgtattttctcaatattgaaatcagtggactttccctcaagcaaatcagaaaccatctttttttctgtttcatccttcagccgatagagcggcgccaaattcaaggccggaaatgtcccctgattggatccatattttctgatttgtgcagccaaatccctttcaatattttcaaccttataaatatgtccattgtcaaaaataatgtgtatacatggtgccttctttgtgaccttgggaatcactttatacttggggtggatatgctgggtttcaatattcgcctgagcaagggcctctgtcagccgatataattcgttgatcatttatcacccctccttttttgaaaaacttagtctgccctcatgaattttaagttcctggctgtagattgcacgaaaatccgagttatagccatccggaaatacttctttgagcatggagggaatcgtgatatccgaaatatctgtgcatacctctgtttccgggcgaaaaggtccgaaataggatggtgtaaactctttccaccccagtaccggtatggaaaatgactgtccccgtttcaggcggcggttgaaaatatcctgatacgcatgaccgggggaggttgtcctgctatcccactccagcgccttttccggcaggttctgcttacagtcatttggcattacttctgcataaagccgatagcatacatcaaccaaaaccgttgcataaagctgataattatttcccttttggatcgattttcctgctcgcagaggccctccatagttggtcacataagaatgatattggatcggtgcacaaatttctaccgccgtcggaacaatcctgatatcaggcccccacagaatggattcaaacatccctctgacggccgaaggcgtgggagcaatgtagcttactggagcgtcaccgcagtcaggtctggagaagagtgcggttgcacctgcaatttccattgctattggatatttgtagtgcttcacttttgggatccctccttttatattcattagtttgggttatgaaattaagtatagccttttttaacctaaatagcaagtctaactttcttttttgattcatttaagaattttttattttactttttaattttttatgataaaattaaatatcttttgatgttatatcaactgtggattgaaatattagcttgggcattttgtatgcaaaaagggctggcattttatgcgattaaaagtcacataaagtgtcagcccttttgtattcttattctcaatagttcatctatcaattctgtctttgcttcttacaccatgcaaaatggatctgctccatcctcattcaccacctgtgccactacaaaaatctgatcaaatcactttgtacttttcaaaggaaaaagcttctggaggtaaatcgtgcagttctggtatctggattttctcttgctggttccattatgctggattgctgctttcggaaaacctatgccccggctcaccacctgtatgctagactcctacctcaaagctaaaaataacttccgttacagtttggtgcctgctccccgttggaatacggcaggcaccaatcgtctgagatgtggtgttgccatctctacggcatcatgatgctccaacacctcgaacccgggaaatgccttctgtttctgtcaaagcgttccaaaattattattaaattagtagcttaataatcaaatcttggccaatttcaaaagaactttcaatgcatagcacacatccctctatatccaatgtataccctctattttcaaatttctttttctacacggtattcaattatcaattttcgggtgggggaatctcattcatcaagattccgagaaattagtcttaaatagtctttcatatggggatatcctttatatcatgttcttacccttaaatatttcttccaaatcagaaccgatacatccacatcgaacatggcattatgcctgatcccctctagtttcttatccacaagcatcaggcggtccgcgtctggatttattcctatagcatatagcatactgcttaaatccaataatggaaaaggtgcctgatacattctctttaccctatctatttctacacattttgcaaacaatcgacactccactggaaatgccacatctgcaatgatttccgcctcttccgcatattttatccaaaagccccagacagcttccagcagctgtgtctccgaatcataggaagtataatctcccagaaaaggcagaacattttcctttacccacggttccttgatgtctaatttatctttcgttatcccataatatacacaatcaatctcttcacctgtatgcttatgaatgaccttcatggcaacagaaataaattccccatacaagccgtctgactctgcatcaacaaacaaaattttatccttatttttcattttctacttcccgtttttttcttattattctgccaacactcctgacaatagttaaagtatttccctgtatttttgttaatacctgtcgattttccacaaattatgcattttctcggcgaagcatgatttgtaaatggccgcctcataatcacggccttttccgcagaaatggatttttcctcatgcaccgggctttccctaaattttccaaatcccacattggtcttcgcaccaatacctacatctagaatcatctgccggaacaatgccagcttttcctctccggaaaccaagaccttcccagtgtcatctgtaaaatccgttaataaaaagcaaaaacgaaaggtaacgttgggctttaccttgatcagctttatcggaatcggacttgtaaactttcccttattatgcggtgtaataaattcaggacttaaaatttccgttttattttctgacaccggaaagacatccaaaaatgtgtctccgtactcaaaaatgttttttttcaatgcctcaatatctatctcttcactctttcccaacagtcccttaatataggctgctttatttttttcctttttactatctccctctggaaaaaggtttctcagcgtaccttttaaggatgaaccttgaagataagggatgcctgacacataatcaaaagaaaaaccacactttaccacgtcatcatgctttaattcgtgtgcatacccggttcccatcaaaagaccaggataaactgtagtaagctgaaaagattttatgccttcgatatcccaaggccgaaaggaaccgtccttgtattgaaaagaaaaggatgttagctccttattccgatccacaaagctttctccctctggcagactgataaacagtttctcctctgcaccactattttgtatttcaactcgaaggttccgaaagtactgtttgttgaaatagtaattcatatttctaatatccgacattcttctttcctcttccttaaattatgtaagtacataaagattcatagctagcttaagcgcaatactggcattaataatattctctttcatcctactctctgcctcattttgagcctttccgtcttctcctgagggatttacatactcaaataatttttttatctcccggctgcacaaatctttttcctgtaatacaatgagaattgcatccatcaacttctgccggtccacctccgcagatcctttatctgaaaagacagcaatggcaggaagcaagctacccatagtgatggcggccccaaaggaagctatctgacttctgaattttttatccacacatccattttccgcaatcccactcttgcaaatagcttcatacgcataaggaatcatttcattcacaactctcttattcatgcttctcctccatatacagttactttacaaagtccgtatccgatggaggcatttccgccgaactggaccacctgattccgaatcacatctataaaacaatcaagaagcgcctcgtcctctgaaattaccggcaaaaagaatatgctatcatggggaacaatctcttcataccacaactgcttgctaattccattatccagcttatttctagcaagtactggaagatcaatcttacgaaactgttcctcctccataatataaatatctcgattcgccacaacagtttttcccacaggtttaaagccttctacttcaatcacatcgtttgtgtatctaatttcgggaatcagtttctttcttataaaaatttccgccaactcgttgattcttaaggcagcgttctttgtagatatgagataaaaaggactctcacccccagtgcttcttccgggaattgccagcatatcagcgctcaaaaactttaccatcccctgctcactcttgccccccgtctccgcaccaaagatggaattgatttctggaactcttctctgtttaaaatgctcccgaaatgccccctttactccagacgggttgatggttggatagccggtaactggatcccgctctacctcattgtcaatcacattataattcacatcgccgtttcctacatgcatgtttgtcatacactgtagcagaatcatatatgctttcattttttccctcctattttgataatctgattataacccattttccttagtccgtttttatccttggacagtgcttctggaatttcttcataaaatacacttcctgctgtgatcaaatgatatctcttctgatttcttctgctcatgcccttctggctgtaatcggttctcagattccggatcagcttggtgtccacaataccaaaatttttatactgaataggaccatccggcaacagatccgataagcaacaataccattcctcctccactccataagaaacaaaaaaggcttccgcctgttcttttaaggaaaggggttcatctaccttctccgcttcaatctgaaacgcagccttctgctttcccatataagcaatactcttctctggtaaaggtttcgcctcatcgtcaagtgtcagataaaggccaaaagctccctgatttaataccaccgtttcccgcctaaacagtccatcctctgcggactcactgttttttcgatttccagtaataatctgcgtcctaaaaaaataatcctctggctttaatcgttccgtttccggctttttgccactgatacagatatagccactcccataacccaactttacccgatagccttctttgcccacaatcggaaaccggaaaccatctcccatagaacacacaagctgtgcagacagcttcatgggtctgaaagccgctccataatcattgtccgtattcttaactgtattacaaaaaggggtccttatataaatatccgcttcttcatccaaaaggaaaagtggggatagttcttttatatatccgaagctctgttcctgctgcggttgaaaagaaaaggtttccgctccacaggctgctgccatcctttccttttctttcatagaataagaaaagctggtttttagaagtccctctgactgcaatatcagatagcgaaccaacccaatcacggtagtctgctccggggttttcttggactccataaaataagttcctttatagccaatctcttcaaaggtaaatccattttcaccgccaaaggtaaagggttccaacggacgaatcctcagcaaatattttctcattccctgtcccctttcttttcttttagaaacttgtctatccgaagcagcatggtaaacgccctaaagcgtcggtcattttccgttttctcatccgtcagcgcctgtatcccgctttgcccctgtacaaaatggtcgtaatagatttcacacaactgattatgaaaattttggttctttttctgatctgcattgtcaaagaaattattccatgcactaaaatactgtttcctggtaagcttctgactatccaacacacgaatcagtgtactcatattctccaatgtaaagatcacactgttaagcgcctccgcttgtgtttctgccgttactccttcctccgtctctaaccccactgtggatttttcaactcctgtgtgtagtagcgtttccaccactgaaacacttctgtgaggaatcaacacgcccattctctgaccactgtgtttctccacctgaactgctatggcatttttctccgtttttttcttcacgtattccaacagcgttcttgcaccggcaagggcctcatacaagggatatttataataccgtacaacaatcccaaaggaaatggtggggattcttctcaacacctcttccctgcctgcaaaggctgctctcacctcagtctgaaaagccttgttgatctccccacacagggaaaaaatacttttttgcctttccccctctataggtgagaggaataacaaatcgtcaccccctgcatagatggtcataccccggaatgccccgatcaattctgccgctttcttatcataagctagacaagctcttgaaaattctgtaatatcctcatctttatcaagactttctagaaacgtccccatattatcgccgtccgccgatatcacggcaaagtaactgttctttttaaactcgctgttatctttgccaaaaccaagagcaatctcctgaatttctcggatactcctcttccccgcttctgaataaaactgattggttgtcttgttaatttccctgaaaagaatacttttggttaccagttcgttgcttctgtgttcattaccatcacgaagcatacgctcaaatggattgttttcctgatcttcaggaaaagtttttaataattccatggcatccagatatggggaaagtgctaaaatagcatttttcttgggaagctcctcttcctctataacgacataatgaatctgcagataatccatgagaaactttatttccttttgcctatttaacgcatcctctgctggaaaattaagaattgtctccctttttaccttgcacacaatccggtccaactccgccttactataatgatcggtcttaaaaataatccggtcgtggtactttcccacgccgtcggcaagtccttccttctcctcataatagggtgaaagtatgtccccatctaacatattctcactactttgaatctctgcacaaagacgtcttgtaatgtctgaaaataggctactggcaaaccagagccccgcaggcttagtagtctcacagatcgtttcaaaaatcggtccaatggtaagtccaatgtatgtactcatccctcacacctccattctttaactggactgatttttcctttaaactccttacccagctcattgtgtaattcatagtaagtaacgtatgcagacataaacgcctccacatcaaaccgatcatctgtaaaatcacttttttccggggttttcaacttccccttctttcttccgctaaattgaaatacctttccataaatctcagtgggaatttctcgtatcacaaaatatatgacattatcaatgattttgaaataaaccggcgactcaattctttcaatctctttttggggatctacaatgcttatcgtctctctttttaattcacccttccatgattgggttgcagccatccccataaaggcccttacatatcgggaattttcatccatcctgtcatatttcctattattttcattttggaatattgccggagcaatcccctgttgcttcatccacgctttttcgttgtcaatgcttttcttaatgttcgaggtatcctttgctttttgttgatttttatgcatgtattcaaacaagaaggaacgctcatagtggcgaaaattttgtccagatttcataatcccataaaaatttttaatccacaaaaaataagtttttgatagttctttttttgacccattttcctccccggaacaataccagcatcgcttagccccataatgttttggcaaccattcctttattctttcgggatcaggagctcctgcttcctgtacaatataactgccaaaccccttatcctgcatcattccaaaattagtcacacaaaaaaactccgtaagattctcctctatgagtgttctcaggtcctcatcgaagcaaagaatttcaagcatcggatctgaccagacaccagccagtttttccatacgcccggtatttccataaaagatggaatatgattcctcttgtccttttttgcgattttcaaggatcccaatctcaaccctctccggtggcctctcacagacaagcttaatcttataatccaaagcatctgtgtatacttttctcatttttttgtataagaaagcatccaacttaggcttcaagtcgcttccccgaagggtcgctcccgtttctctatgctgaaaatggattaatggcgactgtgcaattagatgaacctttaatctgcagccctgaaatttaagtatattttcactcattccttccctttcctttctctatcgtatattcttccatcctcttaaaatagaatattaaataaaaacatcagaaaaacaagaattaaaagcaatatactataactgaaatacttcaatcctgtgtactccttttttttctgtctgctttccatagtctctgagaacttattcataccccaaagaatcattccgaataaaagggaaaatcccaacaaataggtcagtgctcttatccctttttcaaaccagctattcgaaccaatcaaatccacacttgccagaaaatcctgcgccatagagacaattgcaaaggtggtccccgcaacagtcagcatattaacagactggctcatttttctgtctatattgctctggtttttggcatttgcattttcaatttccgcattttccagttcagccacctcatgcaggttattaagctcactgtctaaatatgtattttgttcttcaattttaagagatttcttgaggattgcataaagttccactccctgctcctgaaaagtcacctctggcatatacagctcgttctgaaaacacacataccgtttccaaagattccggatccgttttaccatttcttcacgtctattcgcttcgtcctctgcttcctgacctcctttgtacatatccacagcctcttcttctaaatccctactaatattccgagcgcagctctccaagctaacaatagccgccctctgcgccaaagttaacttagctagctccacatattctgtcaaaaaaggtgtgataacactctttttcaaacctttatcctcgcctgtcatacagcaaaaggcatattctgtaacagtatgaacggttccataatttttccatctgttatagacatgatccttaagcttctgcttaagcatttcagtatcctgacatgtagaaccgtcaaattcacaaaaagcaaaccgatataggttttcttctgattcctcgtttctgtggatggtaaactccttcgaacaatcattatctcgaaccagacacatcacaaacatccgctcatccaatatagattgaatttcaattttacctaaattgccttccccattaatcatctcggccaccagctttggtgccgttaccttcctctgaatatcaggcagctcctcctccgatgtaaaactcgtttcaatacgtctcttttgaatgcttccttctagttgaaactccagtacaattttctccggagtaaaaaaattacccacatcatacactggtgaaaaaagctttcttccgtattcattaatgagacatactcgatcaaaggcactgactattttcttattatatgctccatgatttccagattgcagacaccataccgggcccttatcgtaatactcggtctctatgacaaggattccaattttcatattataaaacatggataatttcagacaattgacaagaagagatatcgtatgattttcgtctttgctttcttgtcctacatcacatcttctggtggttatactaaatgttgcctgcgtatcttctgatttttcaagcttataaataaattggtgattgattttagaaccgtcttccagattgaatacattaggacgtgcttttggcagcaaatattgaaacgtattatactgctcctcaaactggttttcatattgctccttaccagaatgaaaaaatacttcactttcccatccagccttctttaatattttttcaatataaatgggtcttccgctcttatcatgttcttcataggaaaatggataaataaatgtgtgataactgtatggcattttcttctgtacatcttctggcatgccgttacctctcctcttatgattctatactctgttcctagcctgcatactttaattatacaggatatcgatttaattgtaattaggaattttttatgtttaggaaattattcaaataaaaattatcttccatgatttacttattattctataaaattcatcttccaattggaaagaattgttttcattatatgcattttgaattttaataaagacaaattcaatctattatttaattgcatgtttcaaaatagagaaattattttttctctaacacatcatctatcacacatattatgtatctgttcctcctgattttcctttctcttttatctgatatattaataaattcattcgccaattgtgaaagaatccacacagtagaaaatagaattagtattaaaagcagtatgggtggaatttctatcaactgataaaataaatttaatagagcaaacgctatattaagcaatgtaattgccagtgttaaccttgttgacttttctttcgaaatttctatttccgcaatgatatcagctctaatcccatgcaattctcttacatttttcttttttaaaaattcatataattcgtcatatagcaatacagatcttctgttgtcatcatatactttaagcacttctttttgtgcaaattcacagttcctatctatcataatttctcctgtacatcgtcaaattccatataaagctcttcctggaatttttttattctaatccattcttctaaaaatttcttttttatcttttcagccgaaccttgtttaattgcgtaaatcgtaaatcctgttgtcaatatgattccaaaaactgctaaaaaagtataattattaagtccaaaatttttaataaaattacatttaacgcacaatagcatcacagatgcaatactagtaaatatatatggaaaattatatgaacttacaaatagattgcccgttcttacattaaatgcatgtaaacgtctctcccaattaaaatccgctccttcctgaaaaactgctagatatgttcctatcctccacatgcctctctgatagtcaattgtgactatataacagggaataattatagcaaatggaatcaagaataaaattggatcattctttgtgaatgaatatgtaaaaatagcagctactgtaacatatagtagatttctagttttctctataatgtcaaagattttgttaatttcatctcttaacataagatactcatctctattcattataaccctccaatttgtttttacaattttataactattcctctatttctttcatattttactacataatattccaaaatgcataccgcaaactttagtaaaatagccaaaataactacacaatttacatagttgctaaaaaaacgtagaatatgctttatatagtaatatctcctagtgttctcctgcactacctgagcatcggtcatcctttccctctccaactaaaacagctagaaaaccatcgtttcagactgttttttcagcttcaaaacacagtatttccgacacttttgggcaaaactatctgccaatcattttgcggaaatcctgctttcatgcatggcttggaatgacctttcctatcccccctatggaagactgcgaaaattcacgtttgagggggcggcggtttccgagagagggggctaaagattcagttctccccgtcacttgtctgttttctcatcattaaaattacaaaacaatgccccgtttggggtcattttttcccctgaagaatacaaacgtctatgtgatatcgaagaagactaccgtctactcctgctggcacaggagcgcatcgctgacggcggtctagaacatacaattcttttccatgaggcaatggctgaccttggaatctccaatgccgaaattgaagaagcgaaggaattggatatcgaatgagctaccggattaattttatcacggaagcactcattgatatgaaaaagctgaacaattccatccgcccacaggttgtgaaggaaatccaaaaagtcagccagaatcctgtttctgactattagggcagctatagaaaaccacctggcaataaggacggcataaagacaatcaagtttattaggaagcttccaaacgcaggaataaacacgacctaaaaaaatattctctctgcagggtacttttttcatttcctgccgccataatctgcacaatcccttagcataatgttagtacagattattcctccgaattgactggataattacccgaatccggtttcacatagcgctaccaaaacaaaatgcctccacattcgggcaacgcaccatcaaataaaaggtgactggtacttatgaatacaaaaaagatagtcctttactcctcacgctagaggcggagcccttcttggcatcatggcacaaagtatattgaacccacgaagatctccaagactatgcgtaactactgctgtcgttctcctgctcctgtgcttccacatccttcgctcttatgatacaatcaatgtatctaatatgaaatgggagtggttactatcaaatgtattacagaagaagaacttgcaaaagaattacgggcacaatatatccaaaatccaccggaaggaaagacttctgatgaaattcgtgacatgagtgaccaggatcttttggatatggattactttttacatgaatttgatgatattgacgatttcggtgaagaaggcttctatgttttctaaatccaaactgtctgttttctatgcccgatttattctgtctttaatcccaaacaagcactttcatactaaagcaaataaccgcaaaaaatccagtttcagattttctacggtctgtatttgtatttttccacatggggagtgccctgaggatacattattttattaccgaatatagctgctcttcttacaatacagattaaaatattctgcgcggtagttgtctgtggtgtctatcccatgattcagccacgctctatgggccagaatcgcaggatcaggcatctttgctctccttcctggcaatactgctcatattgatgaactttcacgtacttcatgcggtctgctgcgatacaatcccaccatattagattttaagctgttcctaagacgctataaaatctacaaaactttctccccccctacgattcttacagaatatttttaatccattcaaactgctctgcccacttatccctgtctaaaaaatctacatttgtgtcatacaaaatccggctcattttcctatctggcagttcccgccaatccagtattactcctgctgccgtttctatctcctgccttttctcataaagctgccggaactattctttattgtcagcaatcgcgaattccactgccaggacattcttctgcgcattcatcaggaataacatatggtattcagaagaacccaaaccttcggtataccagactctgggcgtcccctccttcctacatggtgaacaccttcatttcccgcttcttcatattcttgtgggaccggtcctgcatggaaagccgtacccgttcctggtctggtatacccgcctggagtaagtgacttccccataagcggtctttatggtggtggttcggccccctttatccagtactgcttccctatcccggccctctgccaactctgtgtcatagggttattaatcaagttttataattgtacaacagacatttaataccttagcacaaaataaattacataaacccagctaagtagtccgtgaaaaatcgcccatccaactgatttccaagttgtataactaataaccattgccagcgcacttccaaacgtaatacccgattttaccgttttctttacggaatcatttttatcgctacattctgacataacaattgtcctccatagtttcatacattccagctcggcaagctgaaagtttacttctcgctactatgctttcgctgctcacgcagttttttccgttcttttttttgcagacgaatcaagagaagcgccaaggcaaagtcccacacttattcctagagccataccaatagcgatatgatcagatgctataccaatggcgaaaccaatactaattccaaaaagcatatagatagtcatccagtttgttaatgggctttccaaaacaaatcggggaccttccgctcctgttccatccggaagaaagctgcatttttctaaaacacgtttggacgcttcattatccggggcagtctctgcctcgacaaatacgacatctggctgaccaaatgcccactgagtcaacgcctgaatagcctcagtcgcatagccttgtccctcctgctcatgcaaaatcccatatcccatctcaaccgtgttatcatggctaggtcccttaaatccatgggcaccgatataagtattatcacttttcaatgtcattttccaaggcgcataccaaactctgtgaatggaatctcgcttacatccggcgaacatttcttcataagctgtacgaagctcatcagcatccgactctgaaatcagcttttcaatctcctgatctgacatgggctgaatcatcattcgctttgtctttataatcgtttgctttttcatgcctatgaccttctttcaattatcttatagtttatattgcataaaattaccattgtcaacaaatccataagccgtgtatagttttactcccatatctgatgccgtaatctggattgtcccacatccctgctgtcttgcttcctcaatcactctattcaagagttcttttccaattccccttcgtctgtaatttgggtttgtatacatacttgacaagagtcccatctttccacttggacatccaaaatacggtggtttttcaacaatggacaacccactggtgccaataatcttatcattttctactgcaagccatgatacaaatgactcatctgacatatgtctgatatagtagtcttttaacgcaggctttaagtcaaaatcttcttttgccccttcttctcttaactgattaattctcatttctataaaaatttcaagttcatcttccgttagctttctaaattcaatttccaagattattctcctcaacagcttaaatcctgctgcattttttgccattccttttttgtaatatgggtaaagtgttctgttctaacatcctccatcaattccgtattttcatatcctcatttatttatgatttcttttaatttattgatgtcttttttcaattaacaaagcactgcttatttacataacctcttcactgtgttagcagttctaatcgtgagcttttctgaaataccaatgcttgccgttgttttccaccagttgcatttctgataagattttctatcaaaagtccaaaaaatcacattttgaaaaacgtgtattgtttcaaggccttctgatggatttcccactaagttttttatatcatctggtgtgtccgctgaaagaataaaaataaggttatcgtatttatctttatctcctagcccccaccactctggagcatttaaaagaatcgtctttaactcattcatcgatatcacataaactggaacatctaccccaaatctttcaactatccttctttcaatggttgatttagaaacttctgcatccgatgaaaaaacaacattgccactattcaaatatgtacttacatcaaaaaaaccagtggcttcaaactcggtcttcaactctgacatgcttattttatttttcccactaatattgatacctctcaaaaaagcgacatatctctccataacaatgcgcctcccttgttatctcttccactacctactatcacttcaagtatcgagcggcctaaactgtggccagctccgtcatccatatcactgcctaaacctctgacatctaatctacagcctaaacctaccacatttttcgccatttcaatttccggtcatgcagactgcccaatagataagttcccatataagaaaacgagactttccgcaaggctcccgtgatggtacgaacctcgcaaagactccagaaacacactttgttttcgcacttatttttcttttcttcacatcaaaccgaccgtctcgacctgtgttgaggctgtgaaaaagattcccgaaaggcataatttcgccttggcggaaatcttattgttttcttaggcctgactttgcctttttatctgcatccttaattgtttccatatatgcctgttccacaggggaaatcgttatcttctgatattttctatattcttctttggctttcttcactgcctgttcatgactcactttaccagaacctgtcaacaattttctatttccagaagccaatacagaatctaattgttcaacatagtcactcatgtacattggcttgtgctcaattgcattgatttcagccaaatcaaaataaccagaaacaagattatttaaaacctttagttcttcctctctcaggtaattttttgcaatacttatgtcctttaatgccggtagttctcctgaaaatgaagttagtcccataaatggtttctctgcatccgcccgttcatatattacttctgctgctgtatgaccatgagcagcaaaatgcagcttattttggacaatcttaaaaaaccggattgactcatcactatgtggatcataatcaacgcttgtagcatataaatcaagcacttggcgatacaatactttttcagatgaacggatatctctgatgcggttaagaagttctttccagtacgttccgccaccattgcctttcaaacgctcatcatccattgtaaaacctttaatcatgtactcctttaaacgctctgttgcccaacgacgaaatcttgttgcagttactgatcttacgcgatatccaagagaaataatcatatcaagattataaaatggtatatttcttgaaacttctctgttgccttcttgacgaacctgtcggaaattccgacaagttgactgctcgtccaactcattctcatcataaatatgctttatgtgttcgaccacattagttctggacgtctggtacagatctgccatttgctgctggcttagccatattgtttcatcttgtattttaacatctatatgtgtcaaaccatcttctgcctggtaaataataatttctccgctattctccattaaattgccctccatacaatcactaactttctaattatgattttcgacttaattcgacacagacctcgcagtgaacagtttcacaaaattgatccaccgccgccgccttcaccacccgatacccacgctccaagaacatctccaaatctcgtgctaaactagtggccttgcaggatatatacacaatccgctccactccgtaatctaaaatcttcggcagagccttgggatgaattccatcccttggggggtcaagtacgatggtatctggcttctcctccagctcgtccaaaaccttcagcacatccccggcaataaaccggcagttggtcagtccattcatccgggcattgcttttagcagcttccacagcctcctccacaatctctactccaatcacttccctggcgacttccgccagaagctgggcaatggtccctgttccgctgtacagatcgaaaacggtcttgtccttagtctcacccacataatccctcacaatggaatagagaacctctgccgcaagggaattgggctggaaaaaggagaaggtgctgatcttgaatttcagccccagcaaagtttcatagaaataatcctgtccataaaggagcctggtctcatcacttctgactacgtcagacagggagtcattgatgatatgcagaatccccacaatccgtccctgaagctgcagctgcagcagttgttccttcagaggctccagatcatgctcttcctggctggttgtgattacatgtaccagaatctctccgctggttatgccccggcgcagcagaagatggcgaagatagcccacgtgctgcatttttttgtaatagcttacctttctctgagaaaaatactgccacacgcagttcagaatttttgtcatgtcttcatggaccagcttacagtcaccggcagtgagtacatcataagtgcttccttttttgtgcaggcccagcgtaagcggtccatccttctgggcatctccaaaggaaaactccattttgttcctatatccgaattccattggacttccatggattccttcccactcatagtctgcctgaccgtccccgtttgtctgcccttttgccgtcaagactgtgtcaagcaggtctctcacctgcttttctttcatcttaagctgctcctgataaggcatggtctgatacatgcagcccccgcattctggaaaaatgctgcacacaggctcccttttctccagtggagatttttccaacacctccagaagccttccctctatacggctggatcgctttttatttaccagaaaacggattttctggccgggaataccgttttttacagtgacacactgtccatccacccaaactcgccctttatttggaaaatctaccttctcaattacaccttcgtaaatctcgccttttttcatttctgtcctccaaatttattaatcaatgcgtgatttcatactgaaacaaagcgggcaggcccgcttcagctccccatccccttactcatgaggggcttagctgctttgtgcgccaatgtgcagctgcgaagcagccttccctaacacattgtgggcatcccccggagggttggttttattacataggaaagttcgaagaactttcctatgtagaattcggatgtgaaaaaattcccttagcaatattatatgggatgataaatgaaatcccaaataaatggcattttaaaacggcaggtgaaaactatatatgttttccatgcaccccaggcagacaattcccatatgatttaccatatgagtacatatccatccaaaagcatatcctttcacatccgaatcctgttatagaaagaaaaatagccccggccaacaccggagctattcactcatttgtaacaccgggcagaatactctgcctgaccactatatcaattggattttattcctcgtcctcaaaatagtcatcaaaatcatcgtcgaagtcttcctcaaagtcttctaaataatccggtgcaaagaagcggtatacagcgtaagcaatacctgccactgctgctacagcgcctacaattgcaagtgcccataaaactgtatttttctgtttctcatcttcttttttctttaatgcagtcaataattcttcaattttattcatattcataatcacgcaccatcctctctaaaatgattactgctattataccaccatatgctcaattttaccataacttctctaaaatttaagaattattgattttacggtattactggacattgatcatataccacttatggtttcctatatttatccaagaccctcccaagacaatcaacatatgaaatacaaaatgttccctgctcttttcaaagccttcctattaattgcttccgtctgggcctatcccatcgccatatccatttcctgtatccacaccttcacctacgaaacataccgccccctgtgatcagcctcgtttcccgctcttttcatttcccagtgagccccactgccttactgcccgcaacaattctatcctccacacgaatcctcagattttcttcagcttggcaaagctggcgaacatttttttcacgcctgccttgtcaaaatctacggtaacctcgtaatcccggccgccttccacaatgtttttcacaattcccacgccgaactttacatggcggaccgtatctcccacttcataatccagcttatctgccttggtcacggtaaaggccttgggctggaaaacttttgcacggaaggcctgcttcatctgcatatagctgttggatgccccggcggcagcggccaaatccggcttcttttctttaatggtatgtccaagatccaccagctccctgggaatttctctcacaaaacgggaaaccttattgtattgtgtctctccccggatcatccgctgctgtgcacaggtcagggtcagttccttcctggccctggtgattcccacataacatagacgccgctcctcttccagctggtcagggtcatctcccacaatggtcatatagctgggaaaaatgccgtcctccatgcctgccaggtaaacgttgggaaattccaatcctttggcgctatgtaaggtcatgagaagcacataatcctggttggggtccacagaatcaatatctgcgattaaggcgatttcctccaaaaattcactgagaacgggttgttctccgtgttccttagcggtctcgtcataggtctctgcctttgagatgagctcgtcgatattttcgatcctggctttggactcgtccgtatcttctgcctttaactcctccacatagccggtctcctcaatcacttcctccagaagctcccgcacggtgtattcgtccgctttggtgcgcagggtctggataaaggaagcaaagctctccagctttcccacgcttctgcctaaagccgggatttcctttgccgttcgcagggcatcatagaagctgatgccatgggtgtccgcataatcctgcacccgccctaaggtggtggccccgatgcctcgtttaggcacattgatgattcttcgcacagccaggtcatctctggcattgtcaatggttttcaggtagcagagcagatccttgatctcctttctggcatagaaattcaccccgcccacaagcttataaggaatatttgccaaaaggaacttttcttcaaatagacgggactgggcattggtcctgtacaaaatggcacagtccttatatttgcactggccctcccgatgctttttctggatatcccccgctatgtattccgcctcctcaaagccgttgagaaactgccggagctggatgagggtcccgtcttcattctctgtccacaaggttttgctctttctctgggtgttattccggatcacttcattggcagcatccagaatgtttttcgtggaacggtagttctgctccagccggatcacctttgcctccgggaaaaaccgttcaaagcccaggatatttcctatattggctccccggaacttataaatggactgatcatcgtcccccaccacacagagattttcatatttggaggccagcagactgacaaatttaaactgggccgtgttggtgtcctgatattcatctaccattatatagcggaatcgctcctgataatactccagcacctctggattattctggaacagctccacggttttcatcagcagatcgtcaaaatccagggcattgctttttcgaagctgcccctggtactcccggtagatctgggcaatttttttcttgttaaaatccccggcacaatccagctcaaactgttccggtgtgatcagctcatcctttgcatgggagatctgggacaaaatggagcgctctttatagagctttgtgtcaacattcatctgcttgcacagatttttcataagggtcttctggtcatcagaatcgtagatggtaaagttgttgtcataccccagacggtcaatatatctgcgcaaaattctcacacaggtggaatgaaaggtggatacccaaatgctttctgagccaaatcccacgattttatccactcgttcccgcatctcctgtgccgccttattggtaaaggttatggccataatattccagggattgactcccttttcttctataagataggcgatccggtgggtgagaactctggtctttcctgaaccggcccctgccaggatcagaacgggaccgtcggtctggtacacggcctcctgctgctgcggattcaaggtttcatatatattcataggtgcctcctgtttcttaagacatcgatttttctaattgtcatttaaccataccagtatagcatggtcttgtttaattatccagaagaaagcgaaaaaatgttcgattatcaaaaggataattgatcctgtgtttttgacaaaatcaattaaaaaatttagagtaaaaaaagaaaaaggcatttacaagtagtaatgaaaactatataataaggagaagaggtgaaaaagaatgacaattgatacgaaagatatgatagacagtattctggccagtatctccagaattgattatattaaaccagaagatctgccaaacattgacttatatatggatcaggtgacaacctttatggagtctcagctctcctccaccaaacgccatccagatgataaaattcttacaaaaaccatgataaacaattatgccaaaaacaatctgctcccatccccggagaaaaagcggtattccagagagcatatgcttttgttgatttttatctattactttaaaaacatcctgtctatcaatgatatacaggctcttttaacccctataacggacaagtattttaaagctgacagtgcgtttgatctgacttatatttataatgaagtgtttggcatggagaaatctcagattgaatatttgaaaaaagacctgatccgccgatacaatgccgcccaggaaaccttccaggatgctccctcccaggaccaggatttcctgaagatcttttcctttatctgtgtcctgagttttgatgtctatgtaaaaaaaatgctcatagaaagacttgtggacgatatgcgggacagcggtgacgtagaaaaagggaaaaaggccaaaaaataggccaaaagcagcagcgatctagaaaacgctgctgcttttttattatttttatttatttatccttggctgcttctttttctttcattctggcaaaaaccatttcatagccgtcattgccgtaattcagtgatctgttcactctgctgatggttgctgtggaagctcctgttttctcggaaatatccagatatgtgcgcttatccataagcatttttgccacctcaaatctctgagacagggacaaaagctcattgatggtacacacatcttcaaagaatgtataacattcttctttattcttcagacacaggattgcctcaaacagatggtccactgcttctgttctgattttcttactcattttctttgctcctttgaatttgctgaaactctctcacatcgttattttagcacgttaaattatcagaagcaagcggttttttatttttatctgtttttcatccggcttttcaaaactttctgtttatgtgccctttcagacaatccacggacctatttaaaaccagttcttccgggaaatccacttcctccagcagaccctttgcctgggtaaattctccgatcaaggtatcaaaatgtgcatcgctgcccatgatcaccggaacctgatattccttacacaaggtgagcatacacagatcattctcccgggccccctggcggaagcagtccggccgcagggaatggttattcagctccaatacctttccgtattccttggcgccttccaccaaggcacggtagtcaatggcataacgtccatcatccggatggccgataatattaatataaggattttccatggcctttaaataggccctggtattctcttcctttgttcctggattcctgcacacggtatgcagactggcaatggtcacgtccaggccctttaactcgccctgtgttaagtccacatttccgtcaaaatccaaaatattcagctctgcgcccagaagcagacggataccgtataattccctgggcagaattttcagattgtgaaaataaaatttctggcaggtgcctggcatggcgggggcatgctccgtgatccccagaagcgcaagtcccttgtctgccgctgtctttgccatctcccgaagactgcagtaggcatggccgctggccacggtatgggtgtgcaggtctaagacatgatcatatttcattgttttcatttcctccatttctctgtatttccttctggatccagatgtcaaaactgtactttgcactggttccgtaccatttatcgctgttacacatcaacatatggcgggttccgcacatggacatatggcaggttcgcacatggacatatagtggattcgcacatggacatatagtgggtccgcacatggacatatggcgggttcgcacatgaacatatggcaggttcgcacatcagcatatggtaacatccatgcaccaaaagcacttttgatacccggatccctttataaatacaggagctcttctctcgtgtttctttggggactgcctggcagtatgattatctgatagtgattcttttttgcccaggtcaagtccgcttcttttttgaatattacacccgtttccctcatatcgtcaaatagaacctgggaatttccatttaaaaatcccctttgctgaggtatactgtagaaaaaggagggaattgccatgctcgattttcgtatggaaacatttttgactgtgtgccaatatatgaactttaccagagcggcccgggctttaaatatcacccagcctgctgtgtcacagcatatccactatctccagcaatactacggggtaaacctgtttgaataccggaacaagcagctgtatctcaccactgcaggggaacgtctgcggtgggcggccaccaccatggttcatgacgagcagaaattaaagagagatttaacggacttggaaaatgtccgacagtctctccgcttcggagccacactgaccatcggcgagtattttcttcctccccggctggcagattttatgcacaaccatccccaggtagatgtatatatggtggttgacaataccaggaatctgctgaacagcctcaatgaaggccaattggattttgccattgtggaaggctattttacccaaaatgaatacgattccctgttgtgcaccatggagccttacatctgcatctgctccgcaaagcataaccttccccaggggcctctggtgctgcgctccatgtttcaagaaaatcttatcctgcgcaatccaggttccggaagcagagaggtgctggaacgggtcctgggagaaaaaggctgccgcctcacagactttcagcacattgtggagatcagcgacctgctggtgatcaaggagctggtgaaggcggactgcgggattacctttctttaccaaaaggcagtggaaaaggagctttcggagggttccataaaaagggtgatgctggaagatttcgagattttccatgagtttactttcctttggagaaagggaagtatttatgccggagaatttcataaaatctttcaggaattgtgtcaaatgccataagtaatatttattgcccaataattaacaataatttttcaaaatatacccagtgtgttaatataatatcaaataagaggcagttttcttaaacagccaaaggaggtttgtgaatggactatttactcaatacggtccaggccgatgcagtccttaaagcgctttccaaagatttcgctgtgtatggaccaaagcgttttcccaaacaaggacgttattccgatactgatattgtaaaatacgacctggtagaaaaattcagtgacattgtgtgggaggaaaaatcagactatcctgcaaaggaagtcatcactcctgttcagcagacgttgttttacttcacagaggacgaatacagggaaagcaaagggccaaaaaaacctctgttgatcctggcccggccatgtgatatccatgcgcagcgtatacaggcgaaaatttatggaggcaacggcggcttcgatgatctctattatgagcgcgtccggaaaatggtgaggtttgccatgatggaatgcagcggcggggatgacacctgcttctgtgtttctatgggaaccaaccggaccgatgattactccctggcaataaaattttccaaggacgggatgaaggtacatatacaggacgatagtttccagtcctattttcagaacatgccacaaacaagctatacacctgcctttgtggaggagaacagcctgcaggtggaggcgccggatctttcggaccggaaggtttatcaggcccttaaaaagcatcctatgtggaaggaatttgacagccgctgcacatcctgcggaagctgtaccattgcctgttccacctgtacctgctttacaaccagggatatcctttatggtgacaatgcagaggtaggagaacgccgccgggtaagtgcctcctgtcaggtggccggttttgatcagatggccggacaaaaagagatgcgggcaacagccggggaccggatgcgttacaaggttctccacaaatttcatgactataaagcccgttttggagattcccacatgtgtgtgggctgcggacgctgcatcaggcgctgtccggaattcatctccattgcagaaactgtacgtaaaatgaatgttgccgtaaacgagatcaaaagtgaacaaaaccggacggaagctaaaaaagcagccgcttccgtacaataaggggggcgaaatcatgttaaatcctgttttaccaaatccttgtaccatactggatgtgcataaggaaagtgagcatgagtggaccttccgggtagcttctgatgccaaaccggagcatgggcagtttatgcagctgtccattcccaaggtgggggaggctccaatttctgtatctgcccagggagagggctggctggagtttaccatccgctcagtaggcaaggtaacggaaggtatttttatgaaaaaggccggtgacacattatttttaagaggcccctacgggaaaggctggcccctggaggaatttaagggaaaacacatggtagtcatcaccggtggcaccggcctggcgcccgttcggtccatgctgagatattttgaggaaaatccaggttatgtgaaggatgtacatctcatcagcggctttaaaaatgaagccggcattgtttttcagactgaactggagcgttggaaaaagagtttttccaccatctatgccttggacacagaagtaaaagaaaattggcgcactggctttgtcactgaatttgtaaaagagcttcccattgacacctttggggatgcctatgccgtggtggtggtaggaccgcctcccatgatgaagtttacagggctggagcttttaaaatgcggcgttgaccccacgaaaatgtggatgagctttgaacggaaaatgtcctgtgccgtgggcaaatgcggccactgccggatcgacgaggtctatgtgtgcctggacggccctgtgttcccctataccatagcccgtgacctggttgactgagaaaggagtagaacggtatgaacagagatatcaatatcaaaaaagtacgcaccaactgcttccgccagtccaaggtgcccggtgaatttatgcttcaaatgcgtgtgccaggaggcttcatagacgcacgctatctgtccgtgatcgaacacattgccaaaacctggggggatgggaatttccattttggaacccgccagacctttgacattaccggtattccctatgatcatattcctgctgtaaatgcctatctggaaacctatattaaggaagtagattcggatctgtgcggcgtggatatgaatctggtagccaatgagcctcaggaatgggagcctgacagcggttatcccaccatcggcgccagaaatatcacggcatgtatcggaaatcatcattgcatctgtgcaaactgcaacacctatgatctggccaggaaaatcgagcccatcattttccccagccattaccatataaaaatcaatattgccggctgtcccaatgactgtaacaaagcccatatctgtgactttggcattatcggcgtggcacggatggtttaccacccagagcgctgcatcggctgcggcgcctgtgcaagggcctgtgagaagggctctacccgggtactgactctcaatgagaacacgggaaagattgagaaggatgcctgctgctgcattggctgcggagagtgtgtacgtgcctgtccggccagcgcctggacccgggaggagacgaaatattaccgggtgatcttaggtggacgtaccggacgtcagacaccccgcactggcaaaatgtttttaaattgggcaaccgaggacgtggttctgaatgtgctgcgcaactggcagaaattctcagcctgggtgatggattataagcctgaatatctccacggaggccacctgattgaccgggctggctataagaaattcaaggagatcatcctggacggcgtggaactgaacccggaatgcctggttgccgaggatatgttctggcatgagactgagtaccgctccaactttaatgtgaagcctctggaaatgcaccacttagccggaccttccaataaataaccatatcatttaactgcccctataacaaagcagccaagtccctcacttatgaggagcttgactgctttgcgcgtcaatatgcagctttaaacagttttcttggcctattgtgtatctccctgcggttgtttatgatcctttcagctctggcaggaaaagcctcactgcagatcatccaacaggatttcctcactgccgcagggactttctatatacagtcttgtctttccccggggccgcaccactgtgaacgaactggcaaaatagattcccgtgctgtctcttatatctccttatgcacctcttcaaagatcctcagatcccattcctccactatgacctcctctccttctcggaatatttctccggtgagaaggtcttttacctcttcccatacacataggattctctgttcttcttggctatagttcaggacataatgaagctgtttaccaaactggtttcttccctgtctcactataatgggccattcatattccatggatttttccacgatcccggcatcttctgccgctctttgcaggatctgctttagaagggctttctctgtgtaacagcctacataataggccttgcctctgccatatgaatttctcgtgatccctgcgtattttctccagtatttatgttcataatctgctaggctttgggccccctccagtttaaggagctctgcgaaatacttcacctgggatttcatgatcttcgttcttcctggttcggtaaactggttgtaactcatgccaaagcagtcatggagcttgtggggctgtttatctgcatagacagtgaaatactcatcagccacaaaggacttaaatgaactcacaagaacgcccccgtccctcacaaatccatccagcttctccagcagctcctctgatgcacagtaaagggccggtgtgacaatcatctgataccgctctggatgaagtgcatggacatccaccacatcgcactcaatgttcctctcatataagcagtcatacatccaacgcaccacatcattatagctgagatcccggtcaatgggaaaccactgaaatgcagtcatagaattgttgtcgatcaaaagtgcggtcttatttttcttttccagatggatgagctgggccccgatctccctccattcttttccgatcacacgggcttcttcgtaggctggattctcctccagatcatggctgagcagtcccttccagtatgtctcaaagctgttatgtatggaatgccagttccagtatgagatgccgtccccgccgcttgccagatgactgtaggcctgcagtcttagctggcccggatagggcgtccagtatttgaaagcctgtgcctgacactcaaggaccagatagttttcgttcttaaggcttctgatggaatcaccgccaaaggcgatctccgcacctgtgagttcatcctgggtgggatgatagatatcggttcccagcttggtgagatacttggatgcctcatagtgattgatcccgggctgtacaccgtaggagtaaccgtcctgggcaatatccgccccgaatttcttccattcaaagtccagattatgggtgataaactggtcttcccgcttatattcccggatgatatccgcctgccagcccaggtaatccgtagccatctttctctggaatttctgaaattctccatccagtcccccgtttatacagccagtgatatcgggaaactgggaccagtcatgaatggaattactccagtagggcagacaaaaggtgtgattcagacgttctgttgtttgaaacttctcttttagatattccctgaacagtctttgtatttcctctcctttattgtcgtaatgcttagtctcattatcaacctggaatcccactacttggctgtgtgcggctgtatgagaaaccagctccctgatcatccgttctgcatgaaaccggaaggtgggattgagcagatcaaagatctgtctgtgaccgtattttgctctgccagaagaattgaccaccatcacatccggatcctttttggcaagccaggagggaacggcgtaggtgggtgtccccacgatcacatccagatctgccttttctgcctcctccagtatcctgtctatataggtaaaatcaaacgttccctctcgcggctccagtgtactccaggtggattcagccacacggatggtattgatccctgctttcttcatcatggaaaaatccttctccattctgtcatagggcatatattccgggtaatatgccacaccaaacatcagttgttcttttttcatggtttttctcctaatccaatatacttttttacgattgccggccccagagggcgcagtacacttcccgctgcacagaaattctcatgtgccgcaggatttcctttcggtatacttttctctctaaaaatatgctaaaataaagatacattcaattccaggaacctgctacagttacctatacaaggcttaccacacccggagccgcaccagaaaggaggtccccttgaaccagcactatcttatgcagcatatttcccgccatctgcatacattgattcgccgttattccttctcctgggagctgctgagacagtctgtgcacgcactgacctacaggacgatggtcttggtccccaactcagagactggttttcttcctttgtttccatggagaaaaaacaactctatcctgtgtttttatgtttgaataaacaggccgtatatgccgccatccctgcagaagaaacaatatttttaataggtccggtttccttttctacgccggttgcttttcgctatcaggatactgtccctgcatttagcagcgcttttaaagccctgatccctgtctgcgattttcgtgattttatgagcgacgtgctgctggcggctaatctttttcgcacagaatgtatggatgaagaacggattttacaggaaaactgtattgatccacagatcaaatatgcactagaagccactcatgtggagcaaacttttgaaaatcgggaattcggaaaactgcacaacccctatgatcaggaaatacgggaatttaccagtattgaaaaaggcaatgtggaggagctgcgctgcagtctgtctgaagattatcctggaaaaataggcaagctggcaaggactccgctgcgccaaatgaaaaaccggggtatcgtggtggtggcccttgcctgccgggccgccatgcgaggcggtattctgcctgaagaggcttattccctctctgattcctatatccagaaaattgaagactgtaatgatatccctacaatccttcatctgtttcattccgctgaatatcactatgcacacatggttcatgagcatagatcccaaaaccgggaagcgaagcgatccaatgaatatactgaggggtgtaaggcctacatcttctcccatcttcatgaaaagattcaggtgtctgacattgcccaaaaactaaatattaacgcaaattatttgtctgaattatttcataaacacgagggtgtgaccataaccgcatatattcaccgtgagaaaatcaagctgacccaaaatcttctcatctactcctcctatacttacagtgaaattgccgcttatctgggttattcctcacagtgccacttgggcagacattttaagcaatacactggaatgaccatgtatcagtatcgaaaaaaatacggcataaaatattattaactgtcaggtccagtacttcttctcactcctcttttaacaacccactgataatgctgtggggcgctgatttccatgtgagcagctgcccccgcagcctgatatgaaatttcagttcctcttcgcttctgttcagcacaaggacggccattgtgccgtctggatttctccacgccgtgaagtcaagtctgtccgtatatcttgtggttccaaggcggacagctcctggttggataaagtgtgaaaaatgccagtaataaccaaggcattttctctcctcaagggtcctattgtccagatcaaacaaatagggagcgtcacagaaatttcctgtgtgattgggtcctccatctgaatccagcaggatattccagtcatagaaggcacacatgccggcgttgagatttccgatcatatcatgggcaagccgctctgcattttcctgctctgcttcttttttatattttccaaattccagacagctttctgacaggatcagcttcttagatggatagcgttcatgaaccaaattcagagcctcaaaatgatccccactgtaccagtgaaaggcaactcctgcgatcatggggtctgtcacctcatcaatgatgtctcttgctctctcatacattctctctttattatgatcccagataaaaacctctatggcagacaggtgatgtctttccagtgcagggaccagataatccctcaggaaatccttctcttcctggggtgtatagacgcaggaatcccattgctgttctgctttgggttcattctgtacagatattctctccacctcatatccccggttctggaattcttctatatacctgcacaaatattccgcccagcggctgcggtattcctccttcaaggagccgccgtgttttctctgggcatttgttttcatataagctggcggtgaccatgcggataacataagcttaagcttcttgcctgctgttttctccgctgcctccagaaggggaaggatatatctttctgtatcagagaatgaaaaattttccaggctgtcatcctttggatctgggtctgcctcatacatatgagtagagaaatcgcagctgtccatatggatccgcactttcctgtagttcatattctcttccgtaaaatacatttgaagcaatttctgcttctgttcctctgacattttcgagaacacatatcctgccgcatcggtaattgctcccccaaatccctccattgtctggcagacaatttcttcatatatattaaggatctggttttcctcccctgtgtccttctctgataacagggtgtcctgctgcaatgcatgtccgtcagtggttgtgtaaaaatctgcttttatcatagcttcctccgttctatgtagtttcactacatcttttcttagctctaatcctatatgattccttttggcatttatatcacatatttcagatttataacatgtttctcatataaatttgatttttctccccagtgatccccactgtttttcttagcctttcctcgcttggttgaggatagaaagttcactgttaatggcgtaaaagtagaagtcttgccccttttgtcattttttatgcagcttcttattggcgcttaaagctattacgctcttttttcatgtgggaatgggactgttaaagaaggcctgtgtgttttctgattgatactttatgtgtgctgtcaatcttacggaatgtaactttgcatccatcacgtttagactatggaaaaaagctttgggatcagattccaagggggacttgatctatatggaacgttcttttggaattaagcataaaatacacagaggcagaatgcctgcccgttctattaaaacaggagttgaatcttatgtttaatttttttaatggcggaggaaacggccagagtcactgccgttgcccaaaccaatgtccgccgcctcgttccccctgtccccctgggccagccggaccacccggacctgctgggcctactgggcctaccgggcccatgggcgttactggacctcgtggttctgccggacccactggcataacgggagctaccggcgttaccgggcctgccggtgctacgggccctactggcttgaacggacctgctggacccacgggcgctatcggacctgctggaccgacgggtgccactgggtctactggctctaccggccctactgggcctgccggtgctgccggcattaccggacctgctgggcctgctggcattaccgggcctactggccctactggcttaacaggacctgccggcgctgctggtgttaccggacctgctgggcctactggcgttaccggacctgctgggcctgccggcattaccggacctgctgggcctgccggcattaccggacctgctgggcctactggcgttaccgggcctactggctcaacaggacctaccggtgctggcggacctactggtgttaccgggcctacggggcctgcggctgcccttccagataatacatttgcatccttttccaattatatgatgcggcttaccaatgcttctcttgtccccttttatgcagctgtcttagacccaacagaccaaatcgtgctgggcagcccggggatcatcactctgtctgcgggttattacctgatatcctatcatttttctgccatattggacactgcaggatatatacagatcactccatcctacaacggagctgctcatatagaaacaagcatttactttatgacaggaaccaaccgctccagtgcttgcggttccaactcattgatcatccatgtgccagaacagacaagattcacccttacctttaacagctcttccactgccattgaaggagagatcactctgtctgccctaaaattaaggaggataacttgatcaccatcagcctgtgtatgattgtaaaaaatgaagaagccgtacttccgcgtatccttgctcccatgaaaaacattgtagatgaaatcattattgttgatacagggtccacagaccggaccaaagagatcgctctggaatatacgccccaggtatatgattatgtgtggcagcaggatttttccgctgccagaaacttcgcctgtacaaaagcaacaaaggattattggatgtggctggatgctgatgatatgatctctccttactggcaaaaagaactgcagcacttaaaggaaaccttggaatccagcgtagatctggtaatgatgaaatacgtcacagcctttgataataaaaacaaaccgcttttctattattaccgggagcggctcatgaaaaataacggggctttcttatggaagggaagcgtacatgaagcagttacccccggaggaaatatcctctattctcccattgagatcgagcatcgcaaaatcacttccggagaccctgacagaaatttgaaaatttatgaagccctcctggataaaaatgaaccactggaccccaggcagcagttctattacggacgagaactctattatcatggccgatatgaggaggcagtggaaattttcaaaaaatttttgagagagcctgaggggtgggtggaaaatcagattgatgcctgtcttcagctttctcgtagctatgaacagctcaaaatggacgaagaaagcctcatatgtctattttacagcttttcctttgacctgcccaggccggaaatctgttgtgagattgggcgggccatgatgaaaaggcagcggcttttgcaggcagtttactggtatgaacaggccttaaattccagacaggaagaaaataccggagcctttattcagaaggattaccaggattttattccttatctgcagctctgtgtatgctatgaccgccttggactccatgaaactgcctatgcttatcacaagcttgcaatggcagttaagccagattccgaaacagttctggaaaatcaggcttattttgaaaccatattacatctgccccctgaacataatttataaaacccacccggaaatcccgcccactcaccaggctcactttttgttcatatagtatagtgggcttcaaaattcacaagccatatttaagaaagggagaaattattatgttttttaataaatctgataaatccaatcgtggtaattgccaggactgtgaccaggagaattcgcctgagatcacggaatgttcaaatttctggtacggaaatgagaattcctccaattgcagctgctccaacagctgtaggtgcggccccacaggtcccaccgggccaagaggctgtcctggtccaaggggctgccctggtcctatgggacctaccggacctgctggcttaaacggggccatgggtcccaccggtcctaccggtcctgctggctcaaacggccttatgggacctaccggacctaccggcgccacgggacctgtgggctatgccggtgtgaccggacccaccggacctaccggtgctgatggggctcctggacctactggtcctgctggtactgtgggagccacggggcctgctggcattaccgggcctacgggacctaccggtgcgactggtcctgctggctttgctggcataactggacctacggggcctgctggtgtaactgggcctgccggacctactggcattactggacctactggcgtgactgggcctgcaggacccactggacccgctggaccgactggcgctacgggagctacaggacccgcaggcactgccgggatcactggtgccactggcgccactggccttgctggattagcgggtgccaccggacctaccggacctactggccttgccgggctggctggggcaaccggacctacaggagctgccggagttaccggtgccaccggacctaccggacccactggggctaccggagccactggacctactgggcctacgggcgccactgggccggccggaaccgctggtactcctgccactgttgcagtgggaaatgttaccactggggattctcatacccctgcctctgtgaccaaccggggggatgcaaataatgctgtctttgactttgtcattccccggggaactgacagcacaaacaaaactcctgaagtactggtcacagtagacaccacagatctatcaccctgggcaggcacagcactgaacttcttggatacccctttgacctccggtactaccatcgcccatgtggccggcacagccaatgtggtgatcgcacagccaggcatataccagtcctccttccactgtactgtggcagtcaatccgggggctattatcccggcagaagtccttcttcagcttacactgaacggtatccctatcgacggagcctccgtccgccataccttcatttcctccaacgaggtggcaacactttctctgaatgtacccttccaggtaacagcagttccttcggacctgactgtgactatcgcacagaacggctttaccatcactgaccgtaccctcactgtgatccgtctgggagattctgtataacagtactgtaatttttttatgaagatcggataggggagattttaccctccccttccacaccacgtagcgtaccgctcggtactacgcggttcaatagtttacacgaactttcggatagtgggctgacatggatggatatccgagtctgtccactatgattgtctttgttagcgcagagtttagcattccggccgctctccacactcccttccggcagtttgccatttcatgtactttccactttggcagatgtagcgcccggagcattttgtatctcgtgcgcaccttcttccattgtttccagtatattgcccggattctatggcgcagccattcgtccgtctgttccatcaggtttttcatgtccgcataccggtagtagtttatccatccacttgcgtagcttcggagtttttcttctcttaccttattgctccatttgttccctctggttgtcagttccctcagcttattccgcattttctccaccgatttcgggtgcacacgcatccggcatttccccttatatcggtagaatgcgtagccaaggtattttattttgcttacatggctcactgtcgttttctggagattgacttttagatatagtttccccgtgataaatggcataatgttctccaacgtccgttctgcgcttttcctacttttacatagtatcagacaatcatcggcataccgcacgaacttgtgcccccttcgttccagttccttatccagctcgttcagcatcacattcccacacaacggactcagcggcccgccctgcggcacgccctctggtgtcgtgtggaatccgtcgtcctccatgaccccggcattcaggtacttgtgtatcagtgagattaccctcccatctttcaccgtccttgacagcacctctatcaatttgctgtggttcacggtgtcaaagtaggattgtaaatccatgctgactgcatatacatatccctcattgatgtattccctgcacctcgccaatgcatcctgtgcgcttctgccggagcggaaaccgaagctgttatctgaaaactgttcctcataaatgggggttagttcctgtgcgactgcctgttggattaccctgtccactaccgtgggcactcctaattttctgaattttcctttctcctccttaggtatttctacccttcggactgggttcggtttatactttcctcccctcacctgttccactatctcggcctggtgctctctcaggtagggcagaagttcatccacctgcatcccgtcaataccaccggctcccttattctctttgaccctcttataggcggcgtttaggttgtcgcttctaagaatcgtatccaacaggttgtccgtcctaaaatccgtgttggtgccagggtttccggtaatcctttcatgggcgtacactcctgcttgctctttctgttccgcagataccttccgcaggtagtcctctatatgaagttgtctgtacttgtttccatgtccggtttccatttgaaaatgacacctcctattgttcagcccttcgtccagtgtttgcaaccactggcttactatggcttctgctgacttctcacggcaagctttactccgtggtaacgaatgttttatcgtttctgccacgtccgtgagacctccccgggtactcacacgctctttcccacttatacctgccccgtctactgctggcgttccgtgcagttattggactttggtttgtatggcaacctcatccacgcttcacagcctatccggacaacttttacaggccagtgttttgcctccggcttccttcagaccccacctcacagtgacgcccttgcctttggctgcatccttcccactgccgggcggatcagggactttcaccccttagaacgtgcgcccgccgggcacaccatcaccataagcccgccaaaaggcgggcttatgtcttagatgtctgaagcttttctttttctttggacagcgaatgcccataggttttcttatatagattgtacagataatgccagtctgaatatcctaccctctctgcgatctcatagattttcagatcgctgttgagataaaggtttctggcctgctccatcctctgccttgtgacataatctacaaaagtcaccttcatggcttctttaaagattttgctgaaataatttttactcacccctatataatcagctaccatttgaagtgacagatccttttttcccagattatcctctataaaattcagtgcctggtacacctctctcttcattccgccggaaaaatgactgtccctgaaaaagagcactctctccaagtccgtatcggccctgacacaggtctccaaagcctgggcatactgcctggaaaggctggccaggcctttttcaaagctgctgactccggcagcggcctcgatcccataatagagcttcagaaaggtaaaagccgatttgagacactccagaaccttcgttttggtttcaaggatagtatccttcccaggcttccctgccgccagaatatattccttataatttgtaactacgatctcatactccagctgcttgcccatagcctcccccagcacattgcttatggaaaactgcagcagctggatatcctgggcaaacacccgggtaagacattcctgatattttaacagcctgacagcaatgacaaatacctgccggtcttcccactgcttcagctcctggttgtctcctatatatgggacttcctctccccgcagaagattccggatataatcttttgcaattatctctggccttcgcctgtgctctttggtatccttgattttgtccagtacctgcagaacagcttccaggatatcctttggcatcatggtaggcttaaacaaataatccttggcccccaactgcatggcgcttctcaccagatcaaattcattgtaactgctgagcacaaggattcccggatcccagcctctcctatgaatttcctggatcagctccagcccgctcatgacaggcatacggatatctgtcataagcacatctacctggttgtgccccatatagtccaatgcttcttttcctgtacaagcctggactgcttccacctggtactgtgaccaggagatggtatttgccactgcctgccttgcatatgcttcatcatccactatcaacaaacgtctcattcagctgtctttcccttctctcatcaccggaaacaggactgtcacacaggtacctcgtcccaccgcactatggatctctagttttccttttttcccaaaattcagctccagtctgtccctcacattattcaggccgattcctgtcagcttgtgaaagccctcatacagaaatccttttccattgtcataaatcttcacctgcatctgtccggactgaatcttacaggcaagagtgatcaaattgtcctcttttccttcctcaaatgcgtggagcaacgcattttctacaatcggctgaaggagcatttttaacaccaggcagtcctcacagccaggctccagcagatattttacagaaaccttacttagataccgcatattttgaattaatatataatcatcgataaattgaagctcttcccttaatggcacctgatccagggtatttttatagctgtactccaaaatctttgtgagagctacaatactgtttgcaatctccatctggttttgagagatggcctgccatttaatggtgtttaatgtattgtataaaaaatgggaatttatttttgcatttaaagccatcatggccatttttgttttttcatgttctttttggatattctctttcatgagagtgtctacttctaaaatcatggtattaaagctggagaccaaggctgccaaatccttattggccggttcttttacctgaatattaaaatttcctttgctcacctttcccatactttttatcaagttcatgatgggcctggtgatgctgtgggacaggctcagagacagccctcctgcacatagaaggcataccaggaaaattaagatccaggtcttctgcattcttcccacttcctgtctgagcatagtattgctgtttacctggatcaaagtccagtccacgctctccattttgacagaacgcacagaagctgctgtgtggctgccttctttctgtgacagccacagttctcccagattccagtctccataatttacctgggaggcgtgtctgcctgcatcctcctccctgggggcatagatcaaatacccattcccatctgccacaaaagcaaaatcttcctgggtcatctccaggaattctatggatttcttcagctttttgtaaggtatatccatctgaatctgtccgatcgccccgctttttgtgtaccggtttagataggtgacaaagctgaccatataggctgcacgggaggagcttcctaaatgcctgtattttgctggatggggcggaagaaccacagatcttcccttttgctcccggttgagctgtccgtccagttcctccagatatgcctgcttattccattcactgttggaagtaaaaccattgccgtcaaagtccaccatgtaaatatgatcaatgagatcatttgaaatacaaatgttggtgagctgtgctgaaatttcccggtttaacagcaatttttcatatggctctttgttactgtaagcttcaaagtcatcggaaagtactgccatgccaaggagctggccggacacattttccacctgccggagaatgctttttacattggcttccatggtctttcggttgttctcctgaaaaatttctactttttctctgtagaattctttcatatatccataataaaacccaaagatgatcagactggacaatatgggcgtgataagcatggctgccgccagcttttttcttaaagatattgcttttattttctctgccaatgctttcattttatccctgtcctctcctcttgctttaaaacagccggcggcttttttccttcagctcctcataatccattataacacggtggatcctgctgctgaactcttcttccaggcattgacacaccttctcaagattatccaatacctccggatatctccccgaggtggtaagaagcaccagcttcccgtcctttatttggaaaatacagttgaaatacaggacagcctccttggtaagccagaacaggtaaatgccctcttctctcatccactgtctcaatatagtgaaaagatccggttttgcagctccccttcggtatcttttcaggcccttggtatgatccagttccctggaaagatactccatatattcatcggtatccatttggaaaatttccggactctggatctttttatcataatcctccagtccctttggcgtatagatccggatttcctgcgcatcttgtgcgtacttccatagatcttcttctctctcaagggcctccattggaatttttaccagctttttgtcccaggaaacagcatgtacacatccatcctgaaccaaaatgtgcaaaattctttggggaggcgtcaaaagatccagaatctcttgtaaatgacaccaaagctttggttccaggtcttctgccacaattttactgtctatcatttccacaattcctccttctaacctgccacaccttgatctcccatggctgcagccagacttccatggctgttgcctctctttggtctttggcattccagatgcctgtaaaatcccggtttccctggaaagtaaggcgtaccttcttttcttctcccttgggattggccaaataaagaagatgcttctcctctttgaaatgtttgtgcacggaaatctctatctctgtgtcctggcagaaatactctcctgtgtcaagtattggacaattcttaatttcctgtggtgatggaagcaggcggatgtcacagaccttggcggcctcctttaaaatcgtgcagacccgcccttctctgtctttctggggcataacaggacccagaaagactgtgcggccggactcttttgcaaaatctgccagaaggctttgatattccggagccatatggtcataggaggaggcaaaaactacctggtaatcctccagccgtgttctgtccacgtagcagtcggaaatatcatattctacatggcctttatccagcaccttcttcatttcttctatccactgttcataactgtagtggctggtgacacaatccatctttctctctggcagcctcccggggataaataattgttccgggatatctgtgccatgaatgaaacagttggaggaaaaggtattccggtctctcagggaaaggagggccttgagccttcccatatcataatttttcaagaccagtgcctggggacaacggctgtactcatgaattttattatcctttaaaaatgacagcagttcaaaaaacatagaaaaccacggaggacgcacacagccatctcttttaaccggacagcctgtccatcggtctctctcagccagcatgtagaaattcactgccttcatcccattcataaaggcatatacataaccaaacgcttcttcctgtgggtttaatatcgtaccccggtcaaaccaggagccggatccgaattctgggacaaagggcagcctgctgctccctgccaggtagcggatccgttctttgagcatggaggtatcttccggctccggataagcatccattccggccacagacagtcccgggattttctcatctctctggacagacaccggcgtataattctgataggcgcagttgtgaaaaatcggtatgggaagtttcagggtctcaaggattcccaccatattttttaatgcctccaaaatctgatactctttatattctgcccagtcaaaatagggctccagttcatggtctccttctttataagctgtgggcggcttcacctcctgccaagtttcatactttgttctgtaggttttattaagagtgtgcaaatccacgtatttttccttcagcatcctttggtacaggtctatggatgctttggaataatccatcacatagggacggtcccgaaagaaattacaggtctcattgtctgcctgaatggcaatgatcctgcccttagggtaacaatgtctccccaaaataggcgccagccgctggaaataccccttggtctcttgaaacagctttggcgaagcataggagggtatgggaaagggctttgtcacataaggatataccaccggcgtgccctggggcgtacgggcctgaatctcttcgtccataagaagccacgagggatagccgaaattggtcatctctgcgttaatatggggccccggtctgacgatcacatacaattccttttggctgcataggtctaaaaatccttctaaattcttctggggatcctgttccccaaaatcaaagttccctcgtacctcctcatggaccgcccatggaatataggtctccacaatggaaaatcccatttttttaatattgtccagagccctctcccaaaactcaggtttcatccgccaataatgaatggccccgctgtaaagaggaagctccctttctcctatccgtatgcctgttgatgtaaattccgtttgttttctcatagtcactatcctttcactgctcccgcagtcattccggctattacctgtttctgaaaaagtaagtacatgagcaccaccggcacaatggatatcacaaagcctgcacacaaaagcccgtacctggcagcataagaaccttttaaagcggaaatcgccagagaaagcgtttttttctgcggagaggagatgagcaccaggcccagaaggagatcattccaacagttcagaaaggccaaagtggccacagtggcgattcccggcttcgcaatgggaaaaatgatgcgaaagaaaatctgtcccttggtgcagccatctatggtggccgcttcatccatctctctggggatactctcgaaaaaaccattcataatgtacatgctgaaagaaatattggcggcagtataaaccaaaaccagggcagccagactgtctgtaagtccgattttcttaaagatcagcacggaaggaatcaagagcgcatgaatggggatcatgatccccagggaaaaataggtggacagcaaagtatttctccagattcttgtaaggatgtagcagcccatggaggtgataatgatcaaaagtactaatgtggccaggcagaccaccatgctgttgaaaaaattccgtcccacatctgcccctgcccatacctgggcatagttttccagaataggctttacaggaattccaaaggggtccccgaagatgctgttattgtccttaaaggaggacagcaccacccataaaaaaggatacagggacaccattgccgtgatcaaaagaacgatgtatttcaataacatactcacctggtatttccaggattttctgaaaaaggccatagctgcccctacctttccctgcccatggcagataatttgttaaaaagtacggtgatcaccagtgacagcagaacaatggtgacggtgacggcgctgcctgttccgaaatcagaatttacaaaagccgttttgtacatatacacacccagataggcggaacgcacccctggtccgcctcctgtcatgatccaggaatgctcaaaggctttcagtgagcctgtgacgcacaggatgatgcagatattggtaaatcctgcaatttccggaagcaccacatggaaaaaggtctgtatcctgttggctccgtcaatttgcgcactctccaccagctcctccgggatggactgaagggctcccagaaaaatcgtcacatacagtccaatatactgccatacctgaggtgccatcactgcatacaacaaagtcttaatattggacagccagttggtttgaaatcttcccagtccaataagctccaggattttattaaagattccaatctcgctgttataaaacaaggaaaacataagggaaatggcaaccggcgcaatgaccacaggaagaaaaaaaatggtgcggaaaattttcattccctttgtcttgctgtacagcagatatgccagaagcaatcccacgggcacctggatcaccagagtgatcaccacaagctgaatggtgttttgaaaggtcagccaataatcactgctgcccataagctctttaaaattttcaagtcctacaaatactttgtccgtaataccattccagtcggtaagactgtagtaaccagtctgaaccaggggcaggaaaaggaaaatggtgtaaatgagaaatacaggcaaaagaaaacccacacagatcggcgcatttttaaattttttcataatacctccttcaggggccgcccaaaaaattcaggaggcctgtgacagcctcctgttcttttacttttccttatccagcacggcctggaccttatctgtgaattcttgggctgtcaatgctttaatgaagagctcatccagactggaatccatcatggaaatggcatccgcactgggcatggttgtgtaatgaacctggaccggctgcttatcctgggtatagtccagggttttctgcatgatcaatttctgcttatccttatccacctctacatttttgcaggggatcatgccgctctctgtaagagattttgtcaactcgtcagaggccagcagatcgcacacctttaaaagggcatcatgcttgtccggattctggtaagattctttgttgatgacaaatccataaacggtaaatccagtctgaatcgtggcgggatcaatggaagctcctggcatctggggaagtggaataatgtcactgatctcctggatatcttctgggatagattcatacatccaggggtaggtgtaagtcatagctgcctttttatctgtatagagctgaaggcttgcgggccatccgccgtttgccatggtgtcctcagggaaaagcttattatcgatcatatctaagagggtttctgccacttttacggcattgtctgtgttaaaggcccctccggaagccagggctgcaatttcttctgcccctccttcatattggttgtaaatttcgctgaagaaaaattcggaaggagtacccccgttgcttccaatggacatggggataataccattgtcattgaaggtttttcctacttccagaagctcctggtaggtggctggatagtccagaccgtattcctggaatagttccttgttagccagcaatacgcctctggtggattcaatagggattccgtaagtatttccgtccccggctatgtagtaatcaaaggcgccctcatcaaagtcttctcttttcacagatccgctgtctgcaaaatattcgtccacattaaggagaagcccagcatctaccatatccttcatcatgccgccgccccagtaggtgaacacatccggcaggtcaccggaggccgtctgggttttgatcttggttttatagtcctctgtactgtaggtctgaagggtaatgtccatggtatctgcattttcctcctgaaatttttcaaaaacaggatagaaataatcgtacttagaatctccttctccccagttggtggccaccacaatggataccttgtcttgtgcctttaccatcaccggtcccagggctgccccacatccggctcccatcactgctgtcatcccccatgcgatccatctgtttcctttcatttgttatatcctcccttttttattttttgcttgcgtgcacgctgtaattattttgtatctatagtattacagaaatcacaatattttgaaataccaatatcttcacggaaatgttataaaatcttccactttttctaatacttatcggttaattttccacaatatcccctggcatttacagaaacttacaaatttctgcttttctacttttctatacagttgtcctatgttatacttatgcggaaatgaataatatgcaaaatagggttctacgcgtcaagtgttcagcggatggggagttgccgccgaaacgaaaagtacgtcttacgatgtaaaacccgcacccgttgcagcaatataagagaacatctcatattgtgtagggaatatttttcgacatatgttctatcacaattggagatgttttttcgtaaaaacaatctccagacatttcgtctgccatgaagaactcatgacagctattaaaaaacaaaggaggttgtttttttggttgacaaaaagaaagtagaggaagccgtccgcctgctcctggaagggatcggggaggacgtggagcgggagggtctcaaggagactccccagcggatcgcaaaaatgtgccaagagatttatggaggcctggaccaggaggcagatgctcatctcctgaagcagttccaggtggaaaataatgaaatggttttggaaaaggatattaccttctactccatgtgcgaacaccatcttatgcctttttatggaaaagcccatctggcctatattccaaatggaaaggtcacgggcttaagcaagcttgcccgcacggtggaggtgtatgccagaaggcctcagatccaggagcgtatgactgtgcagatcgcagatgccctggagcgggtgctggaccccaaaggaattatggttatgctggaggcggagcatacctgcatgaccatgcggggaattaaaaagcctggcagtaaaacagtgaccacggttaccagaggcgcttttcaggatttggaaatgcagaagctttttcttgaaatggtgaagacaagatgagcacaatggaacgagtaaatgccatctggaagcatcctgcctatcaggagcattaccagtccatccagaagctggagacagacaggattttctgcggtcatacggctgtgcactttctggacgtggcccgtcttgcctatgtgcagtgtctggaacagaaattaaagctttccaaggagctgatctacagcgctgcccttcttcatgatatcggccgggatatggagtataccctgggaactccccatgaggaagccggtgctgctattgcaaaacccattttaagggactgcggtttttctcctgaagaaagtgggatgatcttggaggccataaaaggtcacagaggccaggaacacaaaagccaggatgacagaagtgtacttggggaactcctctacaaggcagataagaagtccagaaattgttttctgtgttctgccagggaagcctgcaactggccttcctggaagaaaaacatggaaatccatacataagcaggaggggaacatatgatcatcggaaaccgtgactttgatgttcaaaacaaaacctatctcatgggaattctcaactttactccagattctttctccgacgggggaaaatggaacgacctggacaaagcaatgtcccatgtggaacaaatgataaaagacggggcagatattattgatgtgggcggggaatccacacgtcccggacacacccctgtcagcgcccaggaggaagcagagcgtgtggtcccggtaatagaggccatccgcagacgctttgacattccactgtccattgacagctataaaagcacggtggcagaggcagcagtaaaagccggggcggatctgatcaatgacgtgtgggggctgaaatatgacccggacatggctctggtgattgcccggaaccaggttccctgctgcctgatgcacaacaaaaagaaagctgtgtacaatcattttctcattgatatgctccaggaaacccaggaatgtgtgaatctggcaagggcagccggaatttcccaggacaagatcattctggacccggggatcggctttggaaaaacctatgagatgaatctggaggccatgaaccggctggagctgttccaggagctgggctgtcctgttcttctggggacctccagaaaatctatgatcggacttgctctggatcttccggtgacagaacgtctggagggaactctggccaccactgtcataggagtgatgaagggctgtgccttcatccgtgtacatgacgtgaaggaaaataaacgggtgatacaaatgacagaggccatcttagggcgttgagaagcaggagtgaaaaaacatggagaaaactatggataaaatagaaatcagggatttggaaatcttcgcccatcacggcgtgtatccggaggaaaatgtgctgggccagaagtttgtcctatcggcagtcctgtacacggacacccgcagggcagggcttaaggacagcctggaggagtctataaattacggggaggtgagccacaagatcgcggaatttacccagcaacatacctataagcttctggaggcccttggggaaaacctggcagagctgctcctcacccagtacccttctctggaaaaggtggtgctgcgcatagagaagccctgggctcctgtgggtctgccactgaaaaccgttgccgtggagattgagcggtcatggcacaaagccttcgttgcctttggttccaaccttggggacaaaagggcttatttggatgcaggcattcagggacttaagaataccaggggctgtcaggtgcttcaggtatccgattatctggtgaccgccccctacggcggggtggaacaggatgagtttcttaacggagtactggaaatgcgcaccctgctcactccctgggagctgctggacagacttcatgtgctggagcaggaagccaaccgagagagacttgtacactggggaccaaggaccctggatctggatattttgttttacgacagggatattattgatgagccggacctgcatattcctcatattgatatggccaatcgtgattttgtccttcggcctatggttgagatcgccccctacttccggcatcccatattgaataagaccatggaggagctctggcaggaattgcaacagcgcctggggaactaaaaggactgtttaccataaaaagaggattttcaaatcactcatgtgaaatggaaatcctcttttttattcggactgtttttcacagtccctctttttctcttgtcttattctaatgtcttgttctgatgtcttattctaatgtcttattctgatgtcttgctctgatgtcttgctctgatgtgttgttctagtcttttattttatcctgatctttgtgagagctgactgctgggaccatcttccaaagatcttctgcttctcttgattggtaatgtaagcacgcaccccgaaataataggttcccctggccaaattggtgaaggtcactgtggtgctgtggtaattcttcttcaggttctccccataattcccagggcgcagctcccggtcaatgatgcgaaggcctcttcccagcatacagtcaaagccctctgctctggctcccttggtgaaccggatggtcacctggttccctttcaccttcacagactttatggcactggcattgggggtgtcatggggcatctccaggattcccaggctcccccactggctgtaatgcttccggccgtcctcgtccctgaaccaggaacggcagtagccataataagatccctttcgcacaaaatagaaggaggtgatggcgtctggttcattcaaattggtcttaaaggctgcttccatatccgggagctggctgctcttgctgagatagaagtcatatccctgggctccctgggcctggcccttcagcttcatgaacaccttattgcgctcgtaccacaggcttgtatcctctgccgcctccggggttccggggcgcaccaggttcccctggccgtcatagacgctgccatccgggtaggtcagggctcccgtgggatccaccttcacccctttggggacaatcacatcggcagttccgggacggcggatggtgctcccctcctgggactctcctcctgctgtctctctgtggtataatggccgctccccgctgctgcccggtgtgaggatgatgtcatcctgcgggctgtctttatcttctcccgggagaatgagggttccgtcctccttaatctttacgccgttgatatccgtcacggtgccctctttgtctatggaaggcttctccccgttctccccgggctccagccgggtctgatccggcaggaggatggtgccgtccggctggaccaccgttcccccaggtgtctctatgcttccgtctggctgccacttggagccctccggatagttatccgggatgggcgggatgggcgtgacagacggcacgggcggctcccaggggctgctgtgcacaggtgtggcgaaaaccgtgttggaatccgtacggccctcgtcatttatggccgtcagggtaaagctgtatgttgttccattggtcaggcctgtcaccttataactctccacatccgagctgatggtaaacggggagactgggatttctgtggtctcctgttttactgtcagggaatagtctatgatgggggagccgttgtcaaagggcttcttccaggtgaccgttaccgcaccgtcccctggactggcgttcagcactggtgcttccggcgctgtggcagggatcattatttcattggagaacagtgttccagtaaaaccttcgctggattccttcgcagccatgagcaccttcagggtctttcccaggtcctcccggacaatggtatacgtcagactgtccgcaccagggatgtgaatgttatcccggtaccaggttacggtgtaatcctccggtgtgattccctcgttgtccggaccggaaaccacaaggcgctctcccatgatggtatctccctgaatgatgatagtgccagccaagttcttcttggaaatatccatctcgttgcttttcaactggccgatgacatttccggcaaaggtgacggtgcaggagatttttcctttcttatcactgctggtgagcctgtagctcttttctgtccctataatgctggatgttccgtccacggtcttcttccattgaaagctttctgtaccgcctgcaggttccacgccggaagtatctgccatgaccgtatcgtctgcgttcagttttccatcaccatcttcatccgtaaagactaccctgaccatgcctgttgctttcgccgcctcaataatgaagctcttcgtactctctaatgacagctcataattggctgcgtcctttccggtgagggcggtggcagtggcacaatagcggtctcccacattcgtctgcccacctgtgacctctacttccacctggtcgccgtccaccttgttggaaacaactgcagtgggagcctgtgtctggccattataggtaaagctgtcattgctccaggtaaggacaaccggccgctttgccacggacaggatgccggcgcacacaggtacctccttatagacatcgctgctctgggcagtaaaggtaacctgatagctgtgttccccagcagaaggtaacccggtgctgtccaagctctcattatccacagccagggaaaacttcccctccaccttcttccccatgagcgtagcggacaatttggtggcatcccaggccaggattctttcccaagtttcaccatagaccgaggattcttctatcttcagtgcatcgtctatgcctgtgaactccaaatccacaaccgtcaggagaagcttaccagtgatggttccagtgtaccatccacttccggtaaaggtatatgacacttctgcttgttcgcccttcggcagcttcttcagctcctccaccaccccttcataggatgatctgcccttatagtcgtaggcaaccgtcccggttaccggttcaccgtccacatcggtaaaggaaggctctgtaaaggccgcgattcccctggcgatgttgtccgggaagtcctgtttccggccagtcaggtccttggctgccagattgatatgaactgtgtctgtgatctccttaagattcttcccgccgccgtatttcacaatcagggtattctgccctctcacaaggggtgtcccgcggccagccttataactgagaatgcactcttgtccctccgcagcgtccactggatcggtgagctgcgtatctcccaggaacagcgccgccttatcctgaaccggagctgatctgcgggacgtggctgcagctcctgctttgggcgtaaattttaccgtgatggtatcgccgtaggagaattcactggtctcactctcgcctttataagtcttcaggccatccagggcagtaaccgacttttcaatagtcagcctgacagtctttgaggcctccttataattaccgcctgcctctacggccacctgataatagtacgtccctacatttaccggagcgccgcccttggtggccgcaccactgtcctcaggcgtggtctgcatggtacactcctcgtctgtatagtagatcctggtgactgtatcttctacttcctccccagctgcattggtgatcctgtctttgatctccttttcactgccgtcataagcagccgtcttatcttccatgttaatggtgagctctgcctgtgtcagtgtgagagaggcggatcctttgctggccagaaggttcccgccgccgctaaaatccaccgtgataggaaactccttgctggtgttcccgttcaagttccagtctgtgccgctagttttgatttcatagtctgtggtcactgtaccatcttcgttgtgtgttacgctcactgggtcttcgttcagcttgttcccggtttctttgtcccccagccagaaatctgcggttcccaccgtgccggtaccggaacttccagggatgtcgcctccttgctttttctgtaccgtgaccttgatctctatggtatcaccatatgccacagtttctcccactggcatatggtctttccaaagcgtcacatccagttgggaagcccagttgataatcccggtcccagacacggttccatttaaagtcccgtagcagttgatcacgccgttgtttgtcagcacggccttggcatccaccgtcagtgtcctcccctctggaatggtcagagttgctatctctggtatgatgcagtctgttacaatggttggattgccatgtactgtaccggcactgccctgaaacaggactccgctgattaagctgctttcctcaaagcccgatatatgactagttccatattggccacaagtggcaaagacaacggcgctgccgttcagctgatttccaatgctgcccgccccattatatccgcttccgattccggctccagattctccgccgattgcagtcacttttcctccgctgatctctatatagctgcccgctccagagcttccgcctccgattccagctccatgatctccgccgcttgcggccacttcccctccactgatctctatatacctgcttgatccagagcttccgcctccgattccggctccagattttccgccgtttgctatcagcgtgcctgcttcactctctgtcagtctgtcaatggttaatttgccgatgtcgtctgtttctccattcttttccagtccagcacacccagacccgcctgccagtatgtttgtacctttaagtttaatgttcacgttccctgtggaattatctgctattttaagcgccgcaacataatttgttttcgatacgtcaatggtcacatccgccagggtgatatctgcgcttactttgtcatccaccaggatcacactttgagactggccttgggatccatcagaaatagtgcccgtccatgtaccggaaaccgtgtagctgccgctttttgtcagcgtgaagcccttgccctgggtgtaggcgacctttccatcgtctgatactatggtgatccctcccacagtgattccattaatggtaagctcggcctgccccatggaatccagataaccatcgcctccgctgccactgccgccgtattctgcagtcagggtatttttaccaaattgccagcctagatcactggttatagtgaatggaccactctcagccaccccgccgttaactgctgccttggcaagtacccggcctcccaatttgaagatcacctcatcaggggaagctgtgtagcttctgccagccgtaattgtcgcccgcaagaaaactgtatctccaatagcggctttgtctaccaccgtatcatcctttacaatggtgagaatggtccgtgatgtggtagagtttgggctatttccgctaacccttccggtaatccgaccataattattaatagcaccgttattgataatcattccttgattgataattgtgcccatgttcgtcaaggtcacgcctccctctatggtcagcgtgtgatttgcttcgattgtcaaagtatgcccggcctttatggtcacattgtcgcttatgttcggatttccatatactttaccttgattatcttgaaacagaactccactgatcaaattgctgtcgtcaaatccctgtatgtagccagctccatttcggccatgcttggtatagacaacagcgccgccctccagcttattccctgcgcttcccgtactggagagtccgccgccgattcccactccctcaagtttgccaattgcagtgacctcgccgccgctgatggtaatattgctgcccgctgctttattgcctccgccgattcccgctgctttatcgcctccggttgcggtaacatttcctccttggatcctaataatactgcctactgcattatagcctccgccgatccccgctccatcaccgcctccctttgcagtaacctttcctccggcaatcacaatatggctgcctgctctattagagcccccgccaattcctgctccagattcgcctccatatgcagtaacatcccctccttggattctaataatgctgccctctccagaagggcctccgccgattcctgctccagaattacctgcggttgccgtaataactcctccagcaatcacaatattgcttgccgcttcattacggcttccgccgattcccgctgcataaacgcctgcggttgcattcagtgtaccctctccgttaatggtcaggctgccaatcgcccctccttttccgttcttttgcagcccggcacagtatcttccgcttttcagtatattactgcccttaagggtaatggtgacatttccttgggaattatccgctattttaagtgccgcagtataatctgtcccatatacattaatatttacattgtccagggtgatatgggcatttacaccatctgccacaaaaatcgcacttttggtattatcgcttgttgcgccggtaatatcgccattccatgtaccggtaatcatatagtctccattgtgtgtcagcctgaagccatcgccgctgttatactcaacctcccctccgttcgtggcagttatggtgatattcccctgcgtaactgtaccgctgtcaccagacagctcctcactgccgaataaagaagggatttccaattcttcttcatctaggccgggcgtatacccctccccctgcatttctggccaggcatcctcaaagatggagtcctccggcctttcttccactttcccacagacagcacatacaaaggtacagggacttccccctatgccttgggcatacccgcagttaccgtcatgctctccccgctcatgggggcagtccaggactttggtaatacagccggtgtcctcactgcacacatggccgcacccggacaggcctggattctctccatccagcaaggaagcgccagctcctgtaatgtctgtcaccaggccgcagtctgctgaatgctcgtggacacagttctccaccggtacatagcagtctgctgaatgctcatggctgcaggacattcccggctgtgcctccacataaccacagtctgttgtgtgctccgggtgatgtggacacagactgctccccatcccgccagtccctcctgatgccccgtagaccggtgtgccggacatggtaaaaagcataaccacagacaccagtaccgccgtgacccgcttcgtaattctgattcctctcataaataaatcctccagttcattcactcattgcctttttgcattcaatctgccaaatctccccgtcctcctacaataaccttgcaaacccttgtcagaatatagctttacaaaatactgcaaaactttgactcgtagattgttgaaggtttcgtgggcagaaatggcggcaaataccaggataagctgtgggcacagccgtcccctcttaaaacgcgctgagaatattataacataaaatttttcaagaaaaacgcttccggccctaccattcgtgacgttttcttaccattcgtgacacttttcatgtaaaggacctgtgaatccttataaaaagtataaaaccaggacaaagaaggagctctgtaaagggaactcccgtgtgcttaaggtgttcgatgctttttgcatcccccggagggtctttattacataggaaagttctgagaacttttctatgcaatatgtaataaaaaaaccgtagctgtaattcacattcctgtgatttaccgtctacggttttatatatttatcctataactttcactatggtgtcatatgaaagctcgttggttagccttcagatttcttaggatcattgaagctggctgaacagttccttcactgtgggatagatcttggcaaacttcctgtatttctcctcatatttctctgccagctggggatctggttcaatggtatccacgatcttcacgatctttgcggcagcttcttccacagatgcaaactcaccgtttgccacagcggccagcatagcgccgcccagggcagggccttcctcggactcgatcacatccactttaatattcagaacattggccacgatttttttccacagaggagatttggctccgccgccgcagatgttggttctctcaatctgcactccaagagattttgccacctcaaaggaatctcggatggcgaaggctacgccctccagaaccgcctgggtcatgtctgctctggtggtgtccatggtcataccgataaaggttcctcttgcattgggattgttgtgaggagaacgctctcccataagataaggaaggaaaaatacgttattttcccctaatttgttaatggctttctgctccccggcatagtccttggtcccaatgatctcatccatccaccatttgttgcaggaggcggcgcttaacatgcagcccattaaatggaaatgtccgtctgcatggtcgaaggaatggagagcattgtatttgtccacgccgaattccttgctggaaataaagatggttccgctggtgcccagagagatgttacattttccatctcccacagttccggttcccactgctgccgccgcattgtccccggctccggcaactaccttgcaggtttctggaagtcccagctccagggccacctcaggctttaaggttcccacggtctcatagctctcgaagagcttgggaagctgctcttccttcacctcacagatctccatcatctctttggaccagcatttatgctgcacatccaaaagaagcatgccagatgcatcggaataatcggtgcagtgcacgcctgagagcttgtatgcaatatagtccttcggcagcatgatcttggcgatcttcttaaaattatccggctcattcgccttcacccacaggatctttggcgcggtaaagcctgcaaaggcaatgtttgccgtgtactgggagagtttctcttttccaatctcgttgttgagataatcggtttccttctgggttcttccgtcattccacaaaatagcaggacggatcaccttgtcattttcgtccagaatcacaaggccgtgcatctggccgccgaagctgatgcctgccacctggcttctgtcatatccgtccgtcagctccttgatccctgcctggacctgctcccaccagtcctctggcttttgctctgaccagcctgggtgggggaaggacagggggtattccttggatgtgatattttcaattttgcctgtgccgtccattaacaggagcttaacggcagaggtccctaaatctacgcctatataatacatggggcaacttcctttcttttccacttatcttgtatcctcaagaagcaggggcttccccctgcttcttatggaaccggacataccgcgccggcaatgatcctgccgcttcttatgcgaacggattctcggttgcatagcggtcatgttttggatgattgtattcaatctcagaaacatccacgccaagatatttaaatacctcatagagagcttttccatagtgtccgaaggcaacggctccgtgatgaggatagtttttctccaccagcacgtgacggtagaatcttcccatttccggaattgcaaatacgccgatggcaccaaaggagcgggttgccacaggaagaacctcgccctgtgcgatataagcccgcagtgtgcagtcagcagtgctctgcagacggaagaaggtgatgtctccaggtgcaatgtcgccttccagagtaccctgggtaacttcttccggaagtgttctggccatgatcagctggtacttcattgcacagaaggacagcttcttggtggtggtatttccacaatggaagcccatgaaggtgtccttgtgggtgtagtcatattttccttcgatctcgcccttgtacatatctgcaggtacagtgttgttgatgtccagaagggttactgcatcgccgctgacaacggttccgataaattcggatacagcgccccagatatccacttcacaggataccggaattcctcttccagtgagacggctgttcacatagcagggaacaaaaccgaactgggtctggaatgcaggccagcattttcctgcgatacatacgtattcttttgctcccttgtgggcctcaacccagtcaagaagggtcagctcatactgagccagttttggcagaatctgtggtttctggtttccttcgcccagctctgcttccatatctttcacaatgtcagcgatacgggcatcgccttcatgcttattaaaggcttcaaaaagatccagctcagagttttcttcaatctcgatccccaggtcatacagtctcttgatgggtgcgttgcaggccaggaagttctcaggacgggggccaaagctgatgactttcagtttcttcacagcaacgatggcttttgcgatgggaacgaattcttcgatcatctgggcaacttcttccggtgttcctactggatattccggaatgtaggctttcaggttacgcagcttcaggttgtagctggcattgagcataccgcagtaagcatctcctctgccctgaaccaggttgtcgccgctttcctctgcggcagccactaccatggcaggtccatggaaatattttactaataaggtctctgctgtctctggtccaaagtttcctaaatagacaaccagagcgttgcagcctgcttcccggatttccttggttgctttgagcatgtcttcttcgctctccacaacagttggacattcatagatctctcccttataagcagccacaacagctttttttctgctctcagacaggctcattgggaaacagtcacggcttacagctacaatacctaactttacttctggcatgttgatcatttttgatttcctcctagattttatatgaaattgttttcaggttcttaagcttaaatatgtagattctctccctttaatccgttccatgcgccttcgatcttggcatccggatgggcaagcagccatttatttctggcaaaaaggagcttatcctcaggggttgtctcctctttcttctcaatgtcggtgttggtatcctttggaagcaccaccacacagcggaagccttcctcctgggtattgcagggcgcatagtggaaggtggtggcatacacttcgatgacggttccctttggtaccaggaatgcctgcatcttggcagtgtcataggtgaaatcctcttccatatcctcttccttgcccagaatcagaactaagtctgtgcaggcaatgttgatctcggaatctctgtggtattctgctgcattgagatatttattatggccgttacagtagccgatctgaatgggcattcctccatagaggctgtaggccactttctttgcactttcgcaggcctccaggtccttgtcagatgccacatagatcacatcttctggtaccggagtcttggtcatttcctcaatgatgtcctcacagggaagccccttgatcactttgccgtaacgggaaaaggctttatctgttacttttaagatttccataatctccctcctgttcacttgttatatttggcttttggttatgatttttggtatttgtttagtcattaaactatatttacattgtaccatttttttcatatattgcaatagtttttatgaaaaattcataatttgttatttgaaacagaatcctgcaaagcaggattctctgtctggggcttggcaggaacaagctcgtgaggggcttggcagctaaaaaaagagcacccgcccgccaaagggtattccctcaggctgacgaaatgctctgttttttactccacgctctttaaagattccaccatatcgatcttcttcagcttaaagtgcatggtcatattcacaaaggccgagaaggcacaggtgatcagtccgctgtacacaaagcttaagggggcgatgttccgcccaaacatcacggcatccacctccacggtcacaatgacgaaccggtggagcacaattcccagcagcgctccgaagagaacccccaggatggtgagcagcacattttcccggaatacatactctgaaacctccccgtcgaaaaagcccagcaccttcaaggtggccagctccctctgtctctctgtgatgttaatgttgttcaggttatacagaaccacaaatgccagcataccggctgatatgatcagcacaatgatcacggttccaagggagctgagcatacggtccagctgtcccttcaggctgctcatatagctgatgctcagggcagcaggatattccaggatctcctgtcccacatcctccagctcattcttatattccggcttcatcataaagactgtgtcattgtacttgggtgcctttccgaaggtctcctcatagacctttggagtgaggtatacataatgtcccatgtagttttcacaaatatccgtgatcttcacctcatggcggaccttatcttcctccaggataatgttgtcgccccgcttcagatccagcagactggcggtcttttcacagatcacggctccctggtcggtgagctggtactgctcctttgtattacggtcctgtaaggtcacatcctttttgaaggcttccagatcctgggggacatatacgtacacacttaggttggagcgtccgtccggtgtggtcatctttgtcatcatcacccggttgtaatgatcgattttatcgctgctgtccaaatattcctgaagctcctgcttttcctgggcattggcatcctcatcgtcaatgatcatggcctcgtagtgctgtatattttcatactggcgcacagcaatgtccataatggaatcctggaggccaaagcctaccagcatcaaagccatactccctgcaatgccgaaaatggtcataaagaaacgcttcttatagcggaacaggttccgcaccgtggatttccaggtaaagctcaaatgcttccagataataggaacccgctccagcagtacccgctttccttccttgggcgccgggggacgcataagagaggcgggagtttccgccagttccttgtagcaggcagacaccgtggctcccatggtgcacagcaccgctcccagggaggcgatcatggcaaacttaaattcatagtcaatctgcaggtgggtggacatgttgtggtacataatcccgtaggcatggatgatgatatagggcaggatcttctctccgatgagcacgcctaaaatactgcctcccactgtggcaaaaaatgcataattcagatacttggaggcaatgtcgtattttccgtagccaagggccttcaaagttccgatctgggtccggtgttcctccaccatacgggtcatggtggtaaggctgatcaaagccgccaccaggaagaacatcacggggaacacacggccgatgttccggatcctgtctgcattgtcaccatagtcggaatattccggcaggtcattgcggtctgtcacataccatttgggtttctccaggtcatcaatttccttctgggcatccgcgatcttcttctccccgtccgcgatctcttcctgggcttccttttctccgtccttatattccttccagccctcatccagctctttctgaccgtcctcaagctcttttttggcatcggccagcttttcctcgttgtcctgaatctctttttctgcatccgccagcttttcctcgttgtcctggatctctgcctcgccctctgccatcatctgctcgtttgcggcaatctccgcctcaccggcctgcatggtctgctggctctgccagagctgggcctcattgctttgtagaatctgttcattggcggcaatctcctggcgggcagcagatagctgctgttcgttggcggcgatctccgcctcaccggcggccaccttggcctcattggcctgcagctcctcctgggatgctgccaaaagctgttcattggcccctatgtcctcccagccctgggcaatctgtaccttgccgtccgccacctggatcttggcggcctccagctcctgggcctgagcctccagctgggctgtgcctgcatccaactgggctttggctgcgttcaactgttctctggtggctccaaggactccctctgtctcctgaagctgggcccagccctgggccagctccccggctgcagcgtcaagctgggcctgggcatcattgatctgctgttccatagcagccagctcctcctgagaaaacgcccccgaggcagccgcctgttcatactgggcactttgctcctccagctgggctgccccctggtcatagactgcctgctgctgggtaagctgctctctggcctgggccgcctgggcttccccggcctccagctgagccattccctgttcataagccgcctgattggctgccagctcctggcgtcctgcctccaactgggcttccccatcctgaatctgaagctctgaagctgccagctcctcttccttctgactcagagtctgctttcccagctccagctccttctgcccttgttccagttcagcctttccctcatccaactgctttctggcaggggcaagctgctccttcgcatcattaagctgcgcctccccagccgcaagctgggccttggcatcattgagctgggcccagccggaatccagctctgccctggcgctggccatctggctttggccgtctgcaagctgggctttggcatccgcgatctgctgtctgccggaatccagctccgccctggcgtctgcaagctgctgtctgccggaatccagctctgccctggcatctgcaagctgctgttttccgtcctcatattccttcttgccgtctgccagctctttttccgcatcctccagctctttcctggcgtccgccagcttttcctgggcctccttcttgccgtccgccagctcttcttttgcatctgtcaatttctcattggcttcctgtaacacctgctcatagcgggcatcacactggacgtcctggattccctccaccctgtcctgaacctggctgaccaggtctgtataggaatccgtatagctggtgagcagatccgcctccttcaccaacagatatgcctgggtgtacacctcactgtcaaaattatccttggtcacataggcaaatccattgatctcaccagagcccagggtggtatttccacggttaaaggatatgtacaaagggctggttcccatgcccacgatctcataggtcttcaccttaagcaggtcagaatctccctcaggattgacggagatcttatctcccagcttataatccatggaggaggcaaacatggaatccagcaggcattccccttttttctccgggagccttccctcactgacagtgacctggttcacccgctcatttacagattccagatggagcaccttctgctcactgccctctccacttataatgtctgtgctgtagccgccctccgcatgggccacccctttgatcttctcaatggccttgatatcttcatccgtgatccccagggtgcccaccaccttcaggtccatgagcctgctggcatcataataggcatccccggaaaaccgcatatccggcgatgcactttgaatgccggaaaaaaaggcaaccccaagggccacaataaaaaatatggaaataaatctggctttgctttttttgatctccataaagaaatctttatgcaaagccttcttacttgttttcttcataggccgctcctaccactcaatgtcttccacgggcatgggatgctcgtttaaggtcatcctggacacctttccgttttttatttttatcacacggtccgccatgggagtgagggcagaattatgggtaattacaattacagtcattcccttctccctgcacatgtcctggagaagctttaagatagatttaccggtctggtaatccagggctcctgtgggttcatcacacagaagcagctttggattcttggccagagcccttgctatagaaactctctgctgttctccgccggagagctgggcgggaaaattctttttcctctccttcaggcctacttcctctaaaacctgctcagcatccagtggattcttacagatctgaagggccagctccacattctccagagctgtcagattgggcaccagattgtaaaactggaacacaaacccaatatcctctcttcgataggtggtaagctgccggttgttgtacctggcaatatcctttccgtccaccagcacctttcccttactggccttatccatgcctcctaaaatattcagaaccgtggtcttgcccgcaccgctggggccaaccaccactacaaattctcctttttggatctcaaagctgatctcatctaccgctattatttttacatcgccggaaccatagattttcgacacctggtccagctttacatatgcttcatattcctcattcatatgcaatcccatccttttttccgccggctgtgggtcattgggaccataatctgattctgcgcagccattcttctaagttattagttaaattataccttctttcaacataaagttcaaccgcaatacgaaataactggtctgtgaaatgtagtttcttaaaccatatagtatggtgtacccctataaaaatatgcctccgctggctgctttgtgggcatcccccgaagggttttcttacataggaaagttcagggaatattcctatcaagaaacaaaacagcccattccgtgagaattttctttttctccggaaaaggctgtctctttgttatttctgcagcaggctcataaccattctctgggcgatcttgagagagctttccacatttttgctgtcatcatacattttgagcacctcaccctctgccagggccattgcctccttgtatttggggaattcctggaccacctttccgtttgtgataacctggttcaaaagactgtggtcaatgatcttgtcggtttcctccgtgtcctttttcaggatttcctccgcctcggtggaattggtcacgtccttcagcaccgatgccccctgggaataccggaacagctccatctgaatctctctgtcgttggtgagcattttcaaaaattcccaggcaagatccttctggcggctcttgctgctcacccctatgagcaggctgtctaccttggaaatgttactgcccatgggacctgcgggaagggtaatgcagtcccactggaaattgctgtactttttaatcttataggggtaggtcttataggtcctgtactcggcaaaggacaggggcataaaggccacattgcctgcatcaaaggtttcctgggtcaccctctccccttgatgcagaacattcagcttcttaataaaccgcacggcctcctcggtctgctcggaggccagatagcattccttcccctgatggtcaaagatccgtccattgttggaatagagtgcttccagccagctgtagttataggtcccaaactgatccagacgcccgtccccgtccaggtccttggtgaccttcttgcagatgcggtacagatcattccaggtccagtcagaatccggcacctcaatgccctctttatccagcagggtcctgttcacaaacatcagcgtgggaaccgtctcatagggcagggcatactgactgccgtcaattcttcccgcttccagagaggtgtcataataatcttctatatggaagctcttctcctggccgatctccttatccagattttcaagcagccccagggataccagcttgctgaaatcttccgataaaatcataaacagatccggggcatcgcctctgagtatttttctggacaaccattcagaatagtcgtccttctggatgccgctgtagtaatgaacctttacctcaggatattccttttcaaactttttgatggccttgtccataatcacataaccgtccgcattggccacctcccagtagctgtccccgaacattcccagctccagcacctgggggcttctgttctgcactgcatacaggacaatccctcctatggccagcagcacagtgatggctatggctgcctgttttttattaatcttcatagtcctccagctttcggctgccccgctttgtctgaactgcccaaatggcaagctgggtccggtcacgcaaatccagtttatttaatatggtgctcaaataattacggatggttccctctgacagagacagcgcctctgcgatctcccggttggaggcgcctctctccacctgggcaatgatcttccactccgttttcgtcaactcctttacctgggactcctggatggggatggaataatcagatctggcaagctgggtgaacagccgcagtacctttgtggcaatatctggattgatcatggcccggccgctgtggaccacctcaatggccttcaccagctcatccatggaaacacccttgagcagatagccgctggccccatattttaatgcattgtacacaaactcgtcatcgtcaaaggtggtcaggatgatgatcttgatctggggataattttcttttattatctgggtgcactgaacaccgtccatttttggcatacgaatatccataaggatcacatccggcttctcccgacggatgctctggatcacctcctggccgttggcaacagcgtcggtgacctgaatgttttctctgctctccagcacaatctgaaggctctgccggatcagctcctggtcatctgcaataagtactttaatcataagtctccccccatcttatcggtatggtcgcttcaatacagaatccattgctgccgtcaaaggtgaccgtgccattcagcatctggatccgctcagttatatgccgggtgccaaagcccgcctgaatgtcctcacatccgcacccgttatcctggatgctcaaatggatgttcccgttttcttttctcatgatgatctcaatatgggaggcatgtccgtggcggatggcgtttgtgataccttcctggatcacccggtagatcgcgttttcttcatcctcgtcaaacttcaggatgggtgtgtagcacttgaactccaccctggtatcagacatggaatttgtattttccaccagcttgcggatggcattttccagggaaaaccgttccagggcatccggccgcagctcatttactgagcgccggacctcgtcaagtccctcccttgtcacattcgccagaatcttcagctgtttcttggccacctccggcgtgttgtcaatggtggcgatacaggcctccagccctgtggagatccctgtgagggtatgccccagagtatcgtggatctcccgggcaagtcggtttctctccttggtctcccccatcttctctttcatgacagcatagtgctccagctccagattggcctcccgcagattctcattggccttggaaagctgattatacagctcattgacttcttcaatggtgccccgctcctcctggatggtgagcacacagtagagaataaagacaatgatggtgagggaaataaggatgttgtaggcagccagcagatagggctggtaagcggaatcgtagatttggatataatcccttacagaatacagattacagttcacggagatgatcccgtagtctgtgagggcatagctgacaatcccaaataaaataaatgcgtactgtcccactcctcttttggtgtggccgatgacattggcaaagatccacagaagcactccattgtagttaaaatccagaaaatacacaatggtcatgcccacaacgatgtccaggacaatggtagaataggtaaccttaatattttccggcactaaatactcccggatgataaaagaagccagcagtacccccagccagaagatcacgcagtgatgaatgttctccgggatccagggaatggcgtgtacatttttcaaaaaagcgctggcattataattttcacagataatattggtgctcacaactacaaaaaagctcaccagaaaaacggacagggctgtgatcccaaacatcaaataggtgatgtcgctgactttttgtttgtgtttttccattcttataaccacccgtcaatatcaaattcatccagattgtctttggttaccataatgaccccaacggtgatctccttctccaccggcttcccgctgagatattgataggctgtctggacagcgatccttcccatttccactggctgctgggagctggtcccctccagatatcctttcttgatcatctctttgccgtcaggggaaccgtcgatgccgtagatgagaattttgtcctccacatggttggactgaagagccgccagagccccaagggcagtgggatcattccctcccagcaccacgtcaaatttcagatctgtctctagaatccggtccatctcctccatggagacctcgaattcagaggttgtggaaacctcccccaccacctgatattcccggtgtccctcaatggtgtccagaaatcccttgactctctggttggtagactggatgttatagtgcttcataataaaaatctgggcctgggccttctttttcatcatatccagggcacactggacgccggcctgataattgtcagactgaatgacacaggccaccatctctctgtcatatacattggtatccacgttaaaaataggaactcctgcctcatggcaggcctccagggcaggctgcacctctgtccagtccacaggattcaaaaaaatgccggtgactccctcatcgatcatgtcctgaatctgtgcattttgacgctgttggtcctgggccggatccctggtgagcagaacatctccgtttgcctcaatgacctcacggatgctgtcatttaaagcaataaaatagggattgttcatggtcatataggtggccccgaattttctgggctcctcctgggcctgccgaaggatcttcccgcctggtatccatagggctgcagctatggccccacatcccaggagaacgatcataagattccgtactttttccttcatatttataaacatgtccttttatacatttaggggcatgaacccatgcccccgaaaattatactatacacttgatcaaaattcactaattactttttgttgtacgaacgtagtcaataaatactgccagcaggataaccacaccttttacaacggtctgccagaaagagttcacgttcagaaggttcagaccattgttcaggataccgatgataagagcaccgatgatggttccaccgatcttaccggaaccgccggccatggaggtaccgcctactactacggccgcgatggcatccatctctgcgccctcacctgcggtgggctgtccggaatacatacgggatgccaggatgatacctgccagacctgccattacaccagagaaagcatgtacaaagaattttacattggaaaccttgatcccggagaatacagccgcctgggtgttgcctcccacagcatagatgtgacggcccattttggtcttattcatgatcagggctgttatgataactaccacgatcataatgataactggtacaggaatggggcctacatagcctgccccaaggaactgccattccttggaaaccacacgcacaggagaacctccggtatataccttagccaagcctcgggcaatattcatggttgccaaggttacaatgaaaggcggaatggttgtgcttgcgatcacaccgccattaaaggcaccgatcaccagaccgatcaagatacccaccagaagagctaccggaatgggaagtccataacgggacacacagcctgcagagatcactccggacaaggcgatgatggaaccaacggaaaggtcgatgcctcccaggatgatgaccatggtcataccacaggccagcagcatgttggttgatatctgtctgagaatgttaaaaatgttctttactgatacaaatgaagagcttgtcttgggaaatactgacagaaatacgcacaaaattacaagggctgccaggatacccatattttctttaaaaaatatcatcgccggattggtagtgaccacaccggattttttcgtctcttttgccattttctctcctcctaatctattttcccgctagcgtgctgccaactgcataatggcttcctgagtcacctcttcatggtcaagacatccagctacccggccttctgccataacatacacacggtcactcatgtttataatctccggcagctcagaagaaatcatgataattgaaattcctgtctttaccagctcattcataatggcataaatctctgattttgctcccacgtcaacacctctggtgggctcatccagaatgaggatctctggtgcagtggccagccatcttccgatgatcaccttctgctgatttccaccggaaaggttgccgatcacctgctcctggctgggagtcttggtatccatcatatctatgtatttctgggtgatctctcgttccttcttgctgtccacccggattccatggataaaggagtgcagcacctcgatggtagaattgtaccggacactctgtaccttgtacagaccttccagcttacggtcttcgggaacaagggcgatcccgtgcttcatggcctccacaggagaatgaatggacaccttctgccctttcagataaacatcacccttggatccctgggtcagaccgaaaatggccttcatggtctcacttctgcctgcgcctaccaggccggcgaatccaatgatctcccctctgtttactacaaagcttgcatcctccaccatgttgccgtcagaaatgtgctcgcagcgcaggatctcctctcccggctccagataatctctggtatagtagttggtaagctcacggcctaccatcatggcgatcagctcatcctttgtggtctctttcaccaccttggttcccacgtattccccgtcacgcataacagtaacccggtcgcagatttcttccagctcactcatcttatgggaaatatatacaatgcctacaccttttgctgtcagtgtgcgcatgatcccaaaaagaccggctacttccttgtcggaaatagaagaggttggctcatccataaccaggatcttagaattgtaggaaactgcttttacaatctccaccatctgctgctgcgcaatggtcaaatccttgatcagtgcacgtgcatctatgtccatatcatatgcgtcaagcagagcctgagcatcttttgtcatctttgcccggtccaccagaatcccacttccggcttcccttcctaaaaaaatattttcagccacggtcatatgaggaaccaggaccaattcctggtggatgatagcaatcccgtttgcctgtgcatccttaacccctttgatctcgacttttttaccatcaatataaatctcaccttggtcagcggaataaatgccgcctaaaacttttatcaaagttgatttccctgcaccgttctctcccaacagcgcatggacctctcctgcatgcagctcataattaatattcttcagggcatagaccccgggaaactttttatgtacgttctgcattttcaacaaaacttgtccgctcaatttctcaccctcttactctctatgttttcggatcactcttaagggggattatcctggcggatagctccgccaggataatcattacacgttctaatttttataaaataaacaatccatgaaacttcggatacagcttactgccatccgtctgtgccgtattcttctacgttgtcagcggtgatcaagaaggtttctactggatatctgtcgtcaacttctttgccgtccatgatatcatacataatgtctacagatttctgtgcgatagctactggagactgagcaccggagccttcgatgagggactcgccggaagcgatctcggatttaatgtctggggagccgtctacaccgtagatgaggcatttgcctttttccaggcctgctgcgttggctgctgccagtgcgcctaaagcggtggggtcattgccgccgaagatggctactacatcgctgtgtgcctgtaataagtcttctgcgatacccatggaaacttccaggtttcctttggcatcctgctgtgccacgatctcaaatccatgaccttcgatggcatccaggaaaccgttggtacggtcaactacagagttcattgtaggagaatccagaacgatgatcggtccgccgtccgggcatttcttaacaaggtcttcgccgcagactttaccggcattgtaattatcagatcctgtgtaggatgcaacatagtccatgtcagcaacttctgtgtcaaagttaacaatgggaacaccagcttctttcagagcgtccagtgcaggaaggataccttctgcctctgctggattcaggaaaattccgtccagatcctgtgcgatcatatcctcgatctgtgtgatctgaagggatacatcattggccgggtctgtggagatcagctcatcgccgtttgcctcaacagcctcacggatggctttttcgatggttacgaagaaggggtttgttccgtccatacaagtatagccgaatttacgaggggtcttctcctcagcagatgcggtaaccgcagttcctgccaccatggaagcaaccattgctgtgcacagtgcaacgctcatcatttttcttttcataatttaaatcctcctgtctctttttgatagttagaatcttacacaattattcctctttcctcaaatgaaatttgtaatgaatttccaattacatttgtcacatttggaaattacatatgtaaactttatggatattatatatttatttcctattatatagtcattttatatacaacttgcacacatccctacatttctctacatcttgaagattctggtattagcaaggggcacatttaaggccggctgcaggtctttctcctgcagccggccttatgaacggtctattttcctattgtggcttccctgtttttgcgttttctggtcatcaggcccccgatccgccctgtctcctttgccgacaggcttttccagccattttccagcaccttgtcaagcagtcccagctcctgtgcgatctcgtatttcaattcctcctctggtgtcagctcatgttttttgtatgcctcaacttctttttctttattcaaaactgcccacactcctttctggttgggagtatgggcagtttttcctgactttatacgatatgaggggtatttcttatctggggatcacaatggcggcaataatgtatgcccatattcccgcacccccgaagcaggtaagcacgatccaggccagccgcaccaacgtggggtcaatgtcaaagtattctgcaatgcctccgcacacaccacagatcatacagtttaccgatgatttatataatctcttatttcttaaatcgctcattttataaaacctcctaattttcaaaatccagagccaattctccaatgccgcattctgcttcgatggtcttggatgcaccgttgttgatcttcttcgcccctgccaggccgctgaaatgatcacttccaatcttcatatctccaatgccgcatttgagttcatagttataatcttcctgtctgcctccaagggtagcagtaaactgcccaaccccgcattccatctctatgtctgaggagtgaagcaggtccagagaaatggtgccggccccaacctcccaggtgctgctgccgcaggtgatgattcccttggctgccagctctccggcgccgatgcctgcatccatttcattggcatagagatcactttcaatggtaaccgctcccgtatccacttcaatgtccacttcatcaaatggcatatccttggggtaaatgatggtgacggttctgtcactgctgtgacgcttgctgctctttatggacagcttcttgtcccctgccttcttgtcaatctttacgttgcctccggtatcctcaccgatgagaacctgaaccttatccgtagtctcctgggctgccttcaggatcagattgtcataccgcagttccacactcagctcccttatctcatctgcaggataggtgtagctctgctgggccggataatctccataggtcttcgtcttgccttcaaaacgatcctcaatgccttccacggtgctctccaccttctcttccactttccttgcccatctgtcccagtaatcctcgtcatcgtaatcatcatcgtcataatcgtcatcgtcgtcataatgccagaacctggtcataaatgcccagtccacattatttcccgctgtcttcaccgtatcccaggtggcccccatggccaggcctgctgtggcaaatccaatgcctataatgcagaagattgttgccaggaccaaaaagattttcgtaaactttttcattccttcgcacctcccttttcctccttatgaaggactttgtaaaagaaatctgtgaccttgcgcatgagccagggaagggttctccctccaagccatacaagagctactaaaaacaacagaccaacggccaaaataaagcttccgatgccgatggtaaaaatccccgcagcagcattcaccgtacatactccaatgcctgccacaacggtgacccctcctccaatgagcagtcccaaagcgccggctcccactccgaataccagaaggaaggggagaaagatcagggtaacaagaactcccagggctcctcccacggctcccttaatgacaggtgccagaaataccagaaggatcaaaattaaaataaatttggactgacttttaggttcccggtattgtttccaccgctcctcttttctcttccggcgctcctcatcggtctcctggccgtactgccggggcatctgcccttcctgcggggccctggtatcatggaagccccgttcggtgaactcgccgtaatcctgtgcattctccttcaggtcagccttgataatggccgccaccttgccagggcttcccagctcccggatcaccgcgtcctcattctccggtccggcgtcatcaaaataactgttataataatccagcgcctccagccgctctgcctgtggtatatcccagagcaatctggaaagctgctccataaattgttccctgttcatgctcatattcctccctcgaacaattgcgaaattttaccggaataactcatccattcaatcctatataaattcagctgggcggcacctctgtccgtcagcttgtaatacctccggttccttccggcatatgctttgtcatatacctccagacagtcatccttctgaagccttctcagaaccggatataaggtggactctgaaacatccagtactccccgcacatcctgggtgatcttgtacccataggttccttccttctccttagacacaactgccaggacaatggcatccagaagggctgctcctgtgttaaaaaccatctgctcacttccttattgtgttttataatattatatgaaccatcaatattgttttgataacaatactatacactgtataatatgattttgtcaatagtattttttatttttctgtaaaagttgtccccagtccccctaaggataggaagggccgcctggggcttgcctcctaaggtgaatttcgatataatgcaaaaagaaagcagattcaactgtgtaaaccatttcccaaaataaaagatccctgttccgggaacggcctttggcacccattgggtgtgcaggtgccatttggtgagcaggacagataaaggagctcctatgaacacatcactgccggaagccttctgccagcgcatggaaaagatgctgggccaggaagaataccaggaatttctaaaaagctatgacaatcccagacagcttggactgcgggtgaacactgccaaaatctcctgtgaggaatttgaacagcttgcccccttccctcttaaaaaaatcccctgggtggaaaacggttatttctataaagaagaggaccggcctgccagatgtccttattatcatgcaggcctgtattatctccaggagcccagcgccatgactcctgcttccaggattcccattgtccccggggattatgtgctggacctgtgcgccgccccagggggaaaggccactgccgcaggcgctcttctaaagggcacaggacttctggtggccaatgacatcagcacctccagggccagggccctgctgcgcaacgtggagctgttcgggatccccaattcttttatcaccaacgaacagccgggaaaactggcttccgtcttcccagaatttttcaccaagatcatcctggatgccccctgctccggggagggaatgttccgaaaagaagaggccatggcagaggactggaccccggaaaaatcccgggagctctccaaaattcagcgggagctcatctgcttagccgttgaaatgctccgtcccgggggacttctgatgtactccacctgtacctttgccccggaagaaaacgaggggaccatctcctatcttctggaacaccagccccagatggagctggttgatataccaggttatgagggattttcaccaggagttcctgcctatggaaacggtgatccttccctggaaaaatgtgtgcgcctcttcccccaccgcatgaacggagaaggacatttcctggcccttttaaaaaagccggaaggggacttgtcagcttcctccaagtcaccggccgccccaggaaagtcttgcgccaagggcggcccggacaaggcctcccaaaggcttttagaaagctttttttctgaaacaggaatctcctccctgggccatgctccccttgactactcccgcatggaggtgcgcaaggaaaaagtgtattttctccctcctgccctgggacaggtgcgggggatcaccttcctgcgcaacggcctgtacatgggagacctgaaaaagaaccggttcgagccctcccagcccctggctctggctctgagaaagggtgaatgcgcagccgtcctgtctctggatccggcggatccccgcatcgcccgctaccaaaagggagagaccattgttgtggaggaaggccaggcatctgtaaaaaaaggctggcttctggtgtgcgtgaatggctggcccctgggctggggcaaactggtgaaccagaccctaaaaaacaaatatcctgcaggctggagactttaatctccaggccgcaggataaacactgctctttttgctctttatttcttcttatgggacgaagatttccttctgcagggttatggagtaaatgattttctccttcacctgcttcccagtcattttctccagggcctgggcgtaatactgaagctgcacctgatacagatccagaagcttctgctcctgcccccttcccacctgatccgtcttatagtccacgatcacaatgccgtcctcctcaaagaagtaggcgtcaataattccctgaatgagcacagactggtttttcttccattcctttcggatctcactggcgggctggctgatcacaaagggctgttctctttttagaaggccccggctaaaggcagcccccatgcgttttcccgtaggggactgggcaaaggcataaagcacgttccggtccaggcacagaaattccttctcctttagctttctttttctgcgcagctcctcaagctgtgcgccgatctcctccttggatgataccttggaataatccagacattccaggactctgtggtaggcggtgcccctggctgcccctgtgaattcctcctctttttcttccatgaacttaggaaccagcggaataatatccggctcaaaataaagctgggaggaatcctcttctgtgtagctgcgctttttcagctcggagacactcatttttacgggaatctccttcaaatattcatatggatactggaaggaaaagcgccgtttaagctcccgggcggtgtcctggtggtacacacatccagtgtcccagttctccagaagccttctgcgcacctgggcttcactttgccggctgatctcttctcctatgagctgcaccggccgcacatggttcaggaaaaactctccctcccctccatacagggggctgcggggctctcccgccagctggtattccctgtagaggggctccatggccctgtgccttgcaagggcgggaagcacccacccccaataatctctggcctcaaacaaggtggtaaaaggcagcagggccttggtgcgtttggtaaatccattcagctttctcaccaaaacctccagctttcccaaggttcccgtgaggatcagcttctccttggcccgggtgagggccacatagagcactctcagctcttcccccaggctctcttctaaaagttgctgctgcatcacctgtttgatcagggtactgcagcggatacgcctcttagggtccgccacatcggcgccgataccgtagtccggatggatgaggatgcccgcattcacgtcctgaaggttaaaccgcttgcccatacccgccacaaacacaatggggaactccaggcccttacttttatgaatgcttaaaatctgcaccgtctgctctcctgccgacagattcacctctccgaaatccacggaatatttctggagctgctcaatgtaccggataaaattgaaaagtccccggtagctggtctgctcaaattccatggccttctccaccagcatgttcaggttggccctgcgctggtctcctgcgggcagagcgctcacataattctgatagcctgtcctttccagcagatacaaaatcaactgatgaatgggcgtgtagggaaccctgtcacggagatcacccagctcctcccaaaatagcttcagcttctgtttcaaggccggatcactgtcctcattgtccaggcagacacacacctgctcatagagggcggcttccggcgccattgtcttcaaaagggccagctcctgggccgtgcatcccaccataggagagtacagtacgctggccagggggatatcctgacggggattgtcacagattcgcaggtaattcagcactgtcactacctctagggctgagaaatacccggttttggaggccgtataggcaggaatcccctgtccccccagcacctgggcaaacgcatccgcccacccggccactgtgcgaagcaagatcacaatatccccgtaccgggccgggcggtactccataagctccttgtcccacaccagctcccgcccaacaatctcgtgaatcctctgggcaatggccagagcctccgcctccctggcggcctctacgctcttctcatcctccatctccggggcgtccttctccaccaaaagcacctctgtcacagggaagccctcccagtttccctccggaaactgggctccgggatacagggcagccgcttgatcatactccacctttcccaacgccgctcccatgatctggctgaaaatatagttcacactgtccaaaacctgatggcggcttcgaaaattcctggacaggtcaatgcgctgctcctgactgtcctgcagggtgtaggtatggaatttttccatgaaaagctccggctttgccaggcggaagcgatagatgctctgcttcacatcccccaccatgaaaatattcttcttccccttcgtccagccggataccaggttcaagatggtctcctggacctggttgctgtcctggtactcatcaatgaggatctcctcatatttctccgacagctccctggctgcctggctgggcaccaacgtcctgtcctcctgcctggacgccagaatgtccagagcaaaatgttccatatcagagaaatccagcagatttttctgccgctttgcctgggaaaaacgctcttcaaactccagggtcagccttaccagctcctgcgccggccctctgcacagcttcatggtctccagcacatttccaaggggctgggaaaaatatttttcttccaatttgccaagagtttttttcaaaatctcccggttctccttcatctgttccttcttcccctcagagaccccttctccctttttcctggacagggccttccaggaattctctctcataagagtcactatggtgtcaaaatccttctcctgtaccctcttaagaagctgctctatatactgcaggtcacactgtgccgcctcctcatagggataaggcccctcctggctgcggcacagctccaggttttcttcagatagagccttcatgtcctccagacgtttcttggcatcctgccacaaaagctgcatccaggggctgttggccagctcctgctgggtatccgcctggtaggatgcggcggcatccatcagccattccctgggccagggtgcgctggtggaaaactcatacagcttcagcacaattccctccagcccttcatccgtcttacccggcgcgtaggcgtccaccagcccccgaaagccctcccggccttcctggtgggcatcctccaaaagctggcgcaccacatctgtcttcagaagcttcagctccccttcgtccccggttcggtaacccggatccaggccgatcagatgaaaatagtttctgatcacataagagcaaaaaccgtcgatggtggtaatctgggcattgtggatcaaggtcatctgcttttgaagatggtcattgtccgggtccttctccaaagccccttccagggcctgggagatacgggtcttcatctctcccgccgccgccttggtaaaggtaacgataagaagccggtcaatgtccagaggcttcacagggtctaaaagcatggtgagaatacgctccaccagcaccgcagtttttccggaaccagccgcagcgctcaccaaaatattcctgtcccgcagctctatgacctttttttgttcttctgtccactgtactcccatggcctacacctcctccttcataatcttccagatctcctcatcggaaaacttcttcaagttccggaacacataacctggtattttctgttcaaagccgcacacggactgatagggacaataggtgcaggccttctggcttccaagctgatagggattcacggctacatccccgtctaaaacagcctcctgtatctgggaaatcttcttctgcacaaaatcctgtagtatctggaactgttccttgtctgccacagaggaccctctgcggaagccgccgtccttatttctggccacgggtatggtctccagcgttctgtccattttcaccgccgcatcctcctgggacaggaccagacccttcatcttcagctcctttaacagcttctgctccaccagggccatgtcctcgtttatgtgagcctccacataagggtcctttacattgtaatagaaaattccagcggggatgatctctttgcctggatggcgcaccttctccgcctccacggcccccttcaggtacaccaccagctgcatctgcagtccgtggtaaagggccaccaggtcaaaggacatatttccggtcttatagtccatgaccttcaccagcacatgatcctcctcctcgcacacatccacccggtccacacgtcctcctcccagggaaacctcaaagccctctggaacaaaggagcctctctttagctgctcctggagcgcccacacggtgcgcttcaggatggttcccacacgggaaatgagaaattcgtttctggcgctgctgtgcaaaatcgtattcccataatctcctgccacctgttccagacattcctgggccaggctctcccgctcctcatcctctagagcggcccagtccctgccctctttttgcagggtgcgggaaaaccgctccagggcctgatggaccacgtttcccatgtccatggccttaaactcatactccacccgctccttcagctccagcccatactggagaaaatgggcaaaggcacaggcgctgtaccgctccagcctggttgccccatagggagaaatttctccatagagggtcttggccacacttttgctgatcctgtccatgggattttctgtaaaagcggcctccaccaaagaacgcaccgcctgctcataaaccggatttttcaaataccaggtgtaaagctcctgccacaccgggtcctccttcaaggcctcctccttcagccccttaagaaaataggccaggctgctgccaggatgctgaagctcctccagaggctggctgcgtgtctgggtctcctgagtctcaagacctgggaagagctttttcatggtgctgatcaaataagcaggacttaaaggctctccctttgcattggattgactgtaagaaagatacagcctttgggagggctttgtcatatttaaataaaggtagaacctctgctgggctgtcagctcccgggaaccgctggccagctccatgccctggtcctccagaaattcccggtccatctctgtgaggattcctgcacttgcggtatttttcggaatgttaccctcattcacccctgtgagaaacagaacctttacgcccttcagacgggtcctctcaatatctcccaccagaacctggtccacgctgggcgggatcaaagccacctttgcctctgaaagtccggtctccagaagctgctggtattctgccctggacaccttctccggccccaggatctccaccagcttgtccaaaaggtttaagacaatgccgtatatctgggcatattccttttccatggccagatttccctggcttttaaagatcagctcctggatgcgcagcttttcctgaatgtttccctggacaatgaactggtacagggctctggtatattcctccacggtccttcctctgccggagaaattttccataagaatcccggtctcctccacgaacctggcccgaagggcattcagctcctgaatgtcctctggccgcatgccccggtaaaccctggtccaggtctcctgccaccgcttctttccccgaatgcctaaggctgccacataattctccagccggtctgtctcttccctggacagaccgctcatgccgcagcgcaggtagcggaaaacactttcatagctgtagccctgggccgtcatctcaatggcagagcgcacatattccacaaaggaattcataagcacggaatgcttctcgtcaataaagcagggaatccccacagcctccagcacctggcgggctgtgctggcatattccttaagatctcctgcgatcacggcgatctctccatagcgcagtccctcctcccggaccagggccaggatcttcctggcggtttcctccagctcctccctgggattgggcgctgcatagagaaaaatctcctgctgctctttttcgtaagcctttttcactccataccgaaacaggttctgctccagaaagcccagggccggccgctctgcaaagcgggacttgtctcctgcttccagaaccaaggtcttgtccatgatacagccaggacactccctggccaagttcaccagcttgtggatcatctttttgctcatggcaaagaggctgtaggggcttcccacatgatagggattctccttcacatcaatagtcactgtcacatataccttttcacacagctccaaaagccgggacaccagacggttctgtatgggggtaaaacctgtaaagccgtccagaactacagtgcttccagggattttaacggactgtcccaccacttggcacagcacatccagcacctcctccccggtcatataatgctcctgtaaaaaatccttataggagctgtagagaacctgcacatcagccagcttgtggtgaagaagggctttttcctggctggcgcttaccatgtcctgcattttcccctggtccacgtcatactgcatcagctctgagagcatggattttacctgggcgatgtatccgggctttttcatctggcttcccagataagggagcctgcccttctgctcctggacgattttctggagcacaaggcttttcccggtctcctccagaagaatgcggtcgtctcctcccacctcctcaaagatccggtaggccaggcgctcaaagctgagcacgtcaatatttaatatccctccgccgggatgcatttccaccaggtttttttgagtctgcatggtgaactgctccggtacaaggacaaaatagtccttctccggatgtttcctggattcctggatgatttttttatagatataatgggactttcccccgccggagtttcccaagatgagctgcagagacatatttttattctcccttctactgtcatagtttctattttatgaaaagtccgcataaattgcaagaaccaggaataggatataaaaagtaaaaccagggggtcaatttttcatgagcgcaaaaacgaaaattgtagtattacatatgaaagaagtcatttacaccattatcttccttgtcctggccattatcctgggcattgtccttttcttcatgttcgggcccggtcatgggaaggaggaggccacccaaagccagggccgctacaaggcaggtgtttacagcacctccgtgactctcaatgacaatacctttgacgttgaggttaccgtggaccctgaccggatcaaatccatcggcctgaaaaacctcagtgaaagcaccactgccatgtttcctctcatggagcccgccctggaatctctggccagccagatctatacttcccagtccctggacaacatcacctattctgaggacaacaagtatacctccatgcttctgctcaatgccatagagacagcgctgaaaaaggcggagaattagtttttctccgcctttttctatatgtttcttataatggaatggtctccagctgctccagccataggtttgcacaggcatcgctgggcattctcagatcgcctctgggggatacagccacgcttcctaccttggggccgtctggcagacaggaacgcttaaactgctgattgaaaaatctccggtaaaaggttttcagccatttcaaaatggtctctttgtcataggtgccctcaaaagcctccactgccacacggtataccttctgtggctcaaagccggcgcgcagcatatagtacaggaagaaatcatgaagctcatagggtcccaccaggtcctcagtcttctgagcgatcactccgtccttgggaggcagaagctccgggcttaccggtgtgtccaggatatccagcagaaccttggacagctcctgatcctcacaggtatccccatagtatcttaccaaatgacgcaccagcgttttcggaatggagccgtttaccccatacatggacatatggtccccgttgtaggtggcccaccccagagcaagctctgacaagtctccagttcccaccaccaaagcgccgctttggttggccagatccatcaggacctgggtgcgctctctggcctggctgttttcataagtcacgtcatggttgtccatctggtggccaatatcccggaaatgcaccgtgaccgcttctttaatattcacctcttttaaagaggccccaatgcggtccgccagcttgcaggcattgttgtaggtacggtcagttgttccaaagcagggcatggtcacacactggatattctttctgtccagccccagcatgtcaaaggctcttgcaatgacaagaagggccagggttgaatccagacctccggaaagtcccaccaccgcgctggttccatggacatgggacaaacgcttcttcaagcccatggcctggatattgaggatttcattacaccgcttctctcgatcactcttattagaaggcacaaagggcatgggatcaaatcttctgtccagcaccgtatcctccattttcagatggaaggaaatacacagatggctctgggaatctcccaccggaaaggtggtcatcttcctgcgctcgcaggccagccggttcacatccacatccccataggtgacaccgttttcaaagcgctgcccttcggccagcacggccccgttctcggcaatgagattatgcccaccgaaaaccagatcctgggtggactctccttcccctgcgctggcatagaggtaaccgcacaccagacgggcggactgtccgctcaccatctgtctgcggtagctgtccttgcccacgatctcatcgctggctgacagatttacgatcaccgtagcccctgccactgcatgattgatgctgggcgggcaaggcacccacaaatcctcacagatttctgctgccactaccaaattgggaacctcctgacaagcaaacaaaagctctgtcccaaaaggcactctttttccgtccaattccatatactccaggaaaccttccccagaggagaaatgtctctgctcataaaattccgcataattgggcagatgggtcttaggcacgatccccaggatctctccctgacacagggctgccccacagttaaataactttccctggtgctccacaggcagtcctacaaagatcagagcatccacatcctttgtctccctggcaatatgaagaagctcttccatggctgcctggatcaatgccggctgccagaacagatcctcacaggtatatcctgtgatacaaagctccggaaacaccatcacctttgcctttctctgggccatctcctgaatctgggccagaatggcctgggcgttggctctgcagttggccacctttacatccggtgtggccgcggctgttttaataaatccatatcgcatatgtgtccctctcttctacgctctgcagcgttttagaatatccttcagttcttccacggtaaatgtataattggtgttgcagaaatggcagttcagctccacctcttttccttcccggatcatctccttcaattccttggaaccgatgctgatcagagctttttccacccgttccttatcacaattgcagtaaaatctggtatccaccgtgtccgtaatttccaggtcaaaaccgtccagaaccacctttaaaagactttctggggtatgcccctcctccagaagagaggtcacagaggtaagccggctgatattttcttccaatctgctgatcaccgtttcctgggcaaagggcatgagctgtacaataaagcccccggcctggcgcacggtattgtccttgttcataagaacccccaggcccacagaagagggaacctgttcactggtggcaaaataataggtcagatcctccgcgatctcactggtctgaagaacagtctgccccacataaggctctttcagccccatgtccttgatcacattgagaagccccacacctacggcgccggccacatccagctttcctttgctgttggctgggatacacacattgggatttcccacatagccctttacgttccctttggaatccgcagtgacggtaattccctccagggggcctcctgccttgatctgcagagtgaggagatctttgtcccccttcatcatcacacccatcatggctcctcccgtgaggaggcggcccagggccgccgtagccacaggacttgtattgtgagccttcctggccgtctccaccagctccctggtggatgccgcaaaggccctgatctgcctgtctgctgctgttgctcttacaatataatctccctgttctttcatacgaaaaccttcactttctcattgatctttctattctttcttggaagtacgcacctttcccttttccctggcaaggatatagatccgttcgctgtccattctgggggcttccctggtaaaagcgtcataggctgtgagaaattccattccggcttcctctaatagcttcttaactgtatccagggaataggccttctgataatggacctcttcatatttttcatagaggccgtcttctctgggaaggaaaagggcaagttcatacacattcagcccagtctccggatcatagtcgttctcccagataaaacttccctcctcccggttctctgcaatggtattctgccccatcactgtctcatatttataaaccgtatttaaatcaaagacaaagagcccctgggggtccaggtaattatttgccagccggaatacctggagaagctcttcctcactggtaatgtaattcatagaatcacacacgctgacaatggctctcacggttccgtacaattcaaactccctcatatcctggagcaggtacaaaatgttataaccggattctatgcgtttctccattgccacggcaagcatttcctctgaattatccacaccgatcatatcatagcccctggcggccagaagctgggtgatggtgcctgtgccgcagcccagctccagaaccagtccgtcctttatctggtattcttccaataagccggctatatattcgctccagctttcataattaatatcgtccataaacaaatcatagaccttggcaaactctccatatgcttccatattttttcctccggttcccatcatatcacatccaagccggcatagtaaagagtctagggaagattccaggccagccccctgtcttactcctccctgcccgccggcagacttaggactgtacaaaaatacacatctggacaaaaatccggcagtcagccttattaaggccgctgccggcaaattttcatgattcctctaccatcgtaaaatggaatttcaggggctgatagtctccttttccctccgggagcaggatcccggccctcatgagggctgcacctgtataacaatctccggtcctatggtccctgtagtgggcctgtgcctcaagtccctccaggtacacaaggggaatcctggggttggcctcattgtgaagcattaccccgcttacaatggtctcttttttatccttggacaccagctgccacaacacatagtcctgatttttgaaaggatccgtaaggcggtaataatcgccgcactgaacaagcgcttccatttccttatattcctggatctgtattttagccagctccttctccctgggacgcatgttctctaagtccagctcatatccaaaggttcccgcacttgccacaatcccccttgtctcaaaaggtgtgctccgcccggtctgatggttggggcacacgctcacatgcgcccccatagtgctgatgggatatccaaaagaggttccatactggatcttcagcctatccacagcgtccgtattatcactgcaccagatctgtggcgaatagtaaagcatcccggcgtcaaaccgtccgcctcccccggagcagttctcaaacaaaagatccggataacggctcaccagctgctccatcatttcatagaccgccagcacatatcggtggaagacctccccctgggactgactggaaagagcagcagagtacacattttccacactccggttcatgtcccactttacataatctgccctgcatccgtccagaacctggaaaatctgtcccatcacatggtcccggacttcttttttggtaatatccagattcagctgatgcctgcctcgtaccatatcccgcccaggaattctcaacacccaatccggatgctccctgtaaagatcactgtcctccgagatcatctccggctcgatccagatgccgaatttcagacccagcccccggatcttgtccgccagcctgggcaggcccccctgaatcttgtcctcatttacataccagtctcccagccccgtatagtcggagtctctctttccaaaccagccatcgtccagcacgaacatatccaggccgatttccttggcctccttggctatttggaacaatttcttttcgtcaaactcaaaataagtggcctcccagttgttcaccaaaatcggccttggagccttcacatacttgctgcggatcaggttggagcggtaggcgtcatggtagatcctggacaatctgcccagcccctctgcggaataggccatgatcacctccggtgtctcaaatacctgtcctttttccagtgtataggcaaaatgataaggatgaatccccatcaccacacgaatctgatccagctggtccacctcgatcccacactggaaatttccgctgtaggccagggcaaatccatagcagtccccctgtttttccgtagcttctctgtcacataggatgacaaagggattgtgctggtggctggaagaaccccgcctgctttccacagactggattccatgatgcaggggagcacgctcggtgagccgttccatggcgtggcgcccgtagaaatggatcatatccatctgcttttgaaaacaatccagctccatggacatggcctttttgatggtgaccggcttatcaccctgattttcaatactcacagccctggttatcacatccagctgggggaataccccgtacagaagccgcaccttcagatcactcaccttgtcacacagggtaatttccagtgtgtgagactcattggagccgccgaacatggcaggcagacccttgagagaatatttcccttctctgatctcatggccctcatactgaaggaaggccccgctgcttccatcctggtgctctgcctgcaggccgttgatccgatagtccccgtttccatcagcagtatattcctggggtaatgcgtccagggaaaaggtccggtccaatccggcctcaaagggatttgcgcagaatccccggtccaggcaggcaatccggtgcactgcctgggtatccccgatatctgccccatagtacagatggacaagtgtgccccagtctctcacctgcatctggtacatactgttcctggtgcgaagaacaaatacctttgtgttttcatcatacgttatccatttcataagctatgccctcactttaccagccggctcacgacacggccaaaattacttgtattcttgtactgattatacgtttgcccatatggaattgaaatagtattatgaatgcaatatatggcattatgattatggcaaaatggcagaatttatggtagaatgaaaagtactttatcttaaaataaaaatgaattccagggccttcgcccaagaattttaagtttttcacatggacaggagttgattcttatgagcagtattaaatatacagacagcgccaccttccggtgcctggaaaatctgagggaaacttctcttgatctgggactggtccacacaggaaaggagcaatgtctgcccaggcaggtctgctccggcgtccgcgacgaatatatcattcatttcgtcctgtccggtgcaggcttttactctgccggaaaaagcacctggaccctgggacccgggcagatgttcctgatctatcccggggagcctgtcacttatggggctgactttgctgacccatgggcctatgcctggatcgggtttcacgggatccgttctgacgtccttctgaagcaatgtggtttttccaagaacaatctggtccttccctctcccggaccggagagcttcatgccctgtattgaccagatgctggaacacaaaacacttacctgtgccaatgacctgcgccgccagtccagtcttcttctcctattttccatactcatagacagccatgcctgccagacccagacagaagcctatgaatatggcaccaatgtatatgtggagcttgccattgagcatattaaacaaatgtacatgcatgggatcaatgtatctgatattgcggaaaacatcggcatcagccgggcttacctgaaccatgcctttcagaaggagctggggatcacggtacagaagttccttatggattaccggatgcaccaggccgccagcctgttgtcaggaaccggaatgtccatcaaagaggtagccaatcatgtgggctacaaggaccagctcaccttttcaaaggcatttaagaaaaaatttgacatgagcccaaagaatttcagagtacacaaagataccatgatcaactttacagagaaacagtagccgtttcccttcatttctaaaaaatagtgtgccccagatctgaatttccctctggactcaaaaacggtatagtcatactgactataccgttttttgggcagcctgtgccgcttctatctcatttaccttccatcagctgttgtatgcatttccaaactggtcataagccactccattttcatcgaaccagaaggtatgtccgtcaccgtctgtccaggttccgtccgcattctgccagattccgaaagctacgccgccagaggtatacagatccatgcttcctccattgtagtttccatcagagcttcccccgtcagtggtatccacagtgccggaactgttgtcaacataaccgtaggattctccctgggaataggcatttccatactggtcatatgccactccattgtcatcaaaccagaaggaatttccatcgccgtctgtccaggttccgtctgcattctgccagattccaaaagccaccccgtctggagtgtacagatccatagcgccggcgccggaattataggtgctgccgccagtggtatctgtgtagttctcatctgtaccgccggtagaatctgttccctcaccgctgccggtggtatctgtgccattggcagtatcagtaccagcggttccatccgtattcccctgggtggtgctgctctgggtattcttgttgtcacctgccgttgttcctgtagctgatttcagcgtggaatctgccccctgaatcttgaaggtcttaaaggctgccttcacagcagccaggctggaagcattcttcacagagccggccaggctgtagaattcctggtcattggcaatgacataattctccactgccgcgaacccgccgcccttatctgcgttcatataattcactgtatagctgtaaacattcgcgccattcacctgctcagccttgtaatctttgatctcaaagtctgtgccctctacaacatctgcagaagcggtaagcacggatgcattgtctctggtatccgggagcactgcttcagacatggcttcctcgccctgtccatggaggatcaggatcttgtcccctgctgtggactcaaagctgatggtatctccctcatccatcttgttgctccaggtgctgttgggcagttcaatggaaatactgccgtctgcagcattgtattttgtattctggggaaccggtgtggaagtagctacaggtgccaccgtaggagctggtgtgggtgtattcgtcactaccactgtgggatcttcctcttctttaggtccaaaaccgcacgcactgagcattacggacgaagtcaaaatcacagcaaacaaagtgatcaactttttattcttcataatttcctccttactgacttatctatagtccctagctcatattttacaattttattacaggactgtcaacgtaaattccccggcttatgtgaaaatagtgtgaattaatcctaaacttcgtattaaattcctgtttctcgacagcaggaaagcccaggattctacctgggcttccatatttttacacggcctctgctttctcaaactggctgttatacagcttggcgtaaaagccgtcctttgccagcagttcttcgtgatttccctgctcgataatgtctccgtccttcataaccaggatcaaatctgcatcccggatcgtggaaagtctatgggcaataacaaagctggtccttcccttcatcaggttatccattgccttctggatacgcatctctgtacgggtatccacagaggaggtagcctcatccaggatcaggatcttattgtcagccaaaatggctcttgcgatggtgagaagctgcttctggccctgggagatgttgctggtctcttcatccaggatcatgttgtagcctcctggctgattcttgataaagttgtggatatgggctgcttttgccgccgcgatgacttcttcgtctgtagcgtccagccgtccgtaccggatattttccataatggttccagagaacagccaggtgtcctgaagcaccataccgaacatttcacggagctggctccggttaaagtctcttacatcatggccgtcaatcttgatggaaccgccattcacatcatagtagcgcatgagcagcttcaccattgtggtcttgccggctcctgtggggccaacgatggcgatcttctggccgtcccggatgtctgcggaaaagtcattgataatgatcttatctggacggtagccaaatttcacgtggtcgaatttcacatctccggaaagattggtgatgtctacaggatgttccacgatctgctcttcctcttcctcctccaggaattcaaagacacgctctgaggctgccgcggaggactgaagcatgttggtgacctgggcgatctgctggatgggctgggtaaagtttcggatgtactggaagaaggactggatatctcctacttcaatggcccccttaatggcaaaccagcctcccaggagggccaccatcacatatcccaggtttcccacaaactgcatgatgggcatcatcataccggagaaaaactgtgatttccaggcagattcatagagcttctggttatccttctcaaactccttgagaacatcttcttccttattaaataccttcaccacattgtggccgccgtagttttcctcgatctggccgtttacctcacctaaatatctctgctgatcctggaaatacttctgggaatgcttcataacctttccgatgatggccatggacactggcaggatcaaaagagccaccagagtcatccacacattgatggagatcatcatcaccagggcaccgatcagggtggtcacagaggtgatcatctgggtaaagctttggttaatactcatttgaagcgtatccacatcgttggtgactctggaaaggatctcaccgttggtcctgctctcaaagtaattcaagggcatacggttgatctttttagaaatatcctttctcagattgtaggtgacatcgttggagattcccgtcatcatccagccttggatgaaggaaaaacaggcgctggccagatacaggcccaatgtccacaacaggatcattccgattttcccaaaatcaatgcctccggtgccgttcacctttgacaccagtccgttaaaaagctccgtggtggcctttcctaagattttgggccctacaatgctgaatgcggttcccgcaacagcgaatagaaacataaatacaaaacgaattttataacatcccatataacggaacaactttttcattgctcccctgaagtccttggctttttctgtgggatgcatgccgcggcccattggtccgcgtttttttggttgattactcattggccaattcctcctctgataattgtgacattgcaatctgacgatatacctcacagttcttcagcagctctttatgagttccctttcctgcgatcctgccgtcatccagtacaatgatctgatccgcatgtaaaatcgtgctgatcctctgggctacgatcagggtggttgcctctttggtatatttcttcaatgcacggcggagctgggtatctgtcttatagtccagtgcggaaaagctgtcatcgaagatatagatctccggatttttggcaatggctctggcaatggacagcctctgcttctggccgccggatacattagttccgccctgagaaatatctgaatcatatttccgtttcttggtgtcaataaattccgtagcctgggccacctgggcagcctccaccatctgctgctctgatgcatccggcgctccgtagaggatgttggtggcaatggtgccggagaacaggattcccttctgaggcacataccccagacggctgcgcagatccttctgtgacatttcacgcacatccacaccgtccacccggacagttccgctggtggtatcatagaatctggggatcagattcaccagtgtagactttccgcttcctgtacttccgatgaaggccaccgtctcaccccgtctggctgtaaagctgatgtcctccagcgtattaccgtccgcatcggggtatgcaaaggtcacatgttcaaattccacagtacctctcttgtctgtggagggaacctggggtgactgaggatccaggatcatttcctctgtatccaggacctggcagatacgttttcctgccacatttgctctgggcagcataatggacatcatggtgatcataaggaaagccataatgatctgcatggaatactgaataaaggccatcacattacctacctgcatggttccgttatccactgcatgagcaccgcagtatacgatcagaactgacacgccgttcatgatcaccatcatgatgggcatcataaaggtcatacaccggttcacaaacaggttggtcttggtgagctcatcgttggccttctcaaaacgctcctcctcggtcttctccctgctgaaagcacggatgaccagggtacctgtaagaatctcacgggtgaccagattcagcttatcgatcaatacctgcagttttgtaaatttaggcattgccaccttaaacagggtcaaaatcaccacaaggatcactgccactgccaaggccagtatccaagtcatcgatgcatccgtgttcaccaccttgagcacaccgccaataccgataatgggggcgtagagcaccatacggaagatcatggccgttgtcatctgtatctgctgcacatcgttggtgcttctggtgataagagacgctgtggagaattggttgtattctgcactggagaatccgatgaccttatgataaaccagatttctcagatcatgaccaaagctggctgccactcttgctgacaaaaaggttaccaggatggctgccaccattatggtaaaggccatgagcagcatacgaaggccggacattttcagataatccatctgcatattatccaaatcctcgccgatcgcctggtactctgcccgcacataggcgacggcagactgggtgaccatgctgtcgggcatggattttaatttttcttccatcccctctgtcatcttatctctggcttcctggggcatcatggaaagtgcctgtaccgggtccgtcccctccggaactcccattttctccaacatggcctgggactcctcatttccggaggtaaacccgctgagcataagcatgggctctcccagaatcgtgtttaaatcttctcttgttttcttgtcgatcttttttaatacatacaggtcatcctcttttgtataggaggattccacctcttttttatcttcctcacttataaacagcataagtccgtccatggaggatgaccggattttctccggaacgccgtcttcaatgccctgctgctggatacccacatttacaatcttggaggtataatccggcagagacaggtcacagtatgcctgtaaaaataaaagagctacaatacagacaatatagccggctgattttttcagatatttcatcagtttcagcatatagtttctcctctcctgcttgcttctttgtttctagtctgatatttcctttacatcggtccttcccgtggagaatctccgtgaaatgcacattcgctgcggcctgcgggaatggattcaatattttccagtatttcattaaaaaatctacgtatgaggcagatttccgactctgaaaagccactgaatataattttctcattttgttcaatgacctttttaattcgttcattggctttgtgtccttcctccgtgagaaccacccggatcacccgctggtccttctcatcaggaaggcgtttcacatagccggacttctccagccgccggatagtcacggtcaccgtgggaggcttaatgcgcagcttcttggcaatctccttctggctgagacctttctcataataaagaagccggagcatgggtatctgtcccggatgaatcccctcattcatgatctgtccatagatcttcacaaaatattcatgtgtcatgcgcacaaacagcccctgaagagaattattcatttctttgtcaaacacagcttcacctcctccttgatttacttagttggctaacaatataatattccttttccggaaaaatgcaagctttttttagttaatttatactttttttagaattgcaatttgtgaatatttccttattttaattaaatagctaatcttttttctctgtgtaccgccccccttggaaaggaggctgccctccaggccagactatctctattctatgtaattcttctccatgtgttccttatgggctaaaaggccttcaggatttccttaataaggtggaaaaaagccgtgatatgcaatagaactgtgcataccacggctttttataactccctcatgggtttctagatttttctcaaaatccttccttgttttcaaataccaggccatttattttaatagaagcagacaatgggatcctccggacggatgatgctgtaaagctgtgcggcggaatccaccgggagattgacacagccgtgagagccaaagccctgaagatacagatctcctccaaagccattgtactgccagtctgcatcatgaaaaccaatccccccgtcaaaggccatccaataggtcaccttctggacatactctggttttccattgggcagagggtcccctttcagctctgagggactttcttggttgtacatacggaaaattccctcccgtgtctcatgctttccatccatctttcctgatatgaagggactttcgaaaattaaatttccgtccctgtaataatacatatattgataacccagatccacttcaatataagtgtctcccacatcactgcttccataggaattggcggtcctgctgtagatcggctctcttgcagtcacctgaccgctctcaatctcctgggccagctgctggacctctgcctcctgatcgatctgccagccataatcccaggcatatacattcacctgtcggccgctggtggtggtaaaggtccggtctgtctggtaggtatcgtacttcatggccagatcagccacaaagctgcgaatgttttccatgaatgtttcttcatccctgacaggttttccctgttggtctgtgctcagccagtcctttatggtgtttccgtccagaaccacccggtcatcaccgatcatataggtaatgctggcgctggaatactggttgtataccaaaagggcctcctgaagtccctcgtccccgctggtgacagcgggcacctcatatacgccctcctgctccaggtcaatctccatgcgtccctgtgacagagcattttcaatggactggacagcctgtcccacagccagggtgcttccctgatcctccggcacaatttcaaaggcatggtccttgtaatctatgtaagcatccctgggaggcgcctgctgctggggatccatacagctcagggcatttaccttgttctccagaagttctttgtcataggtcacattttcttccacagaatgtgtcctcttcctaaaatatcccgtgagccacagatacggcttctgattttctaaaagccggtaaacttctcccttaggttcataggcataatgaatctcgtttccaaaaatctcctggggtacctggctgcgggccttcacggtaagccggtagtctgcaagcctcaaggcaagaaggcgctccacctggtcaggagtcatggctgaacagtccataccgttcacactggttcccggaaagaacttatctgtaaaataataagagatgcctccatagatgcacacggccacagtcaaaagcattgccgtcaccacggccagtattgtggctgcctttttcttctgttttgcctttggcacagtgcagatgctgtccagagatactgctgtcatggtatttaccatgggccgggcgctttttccccctcccggcctggctccatgctgtcttcctcttcgctccccgctctgctgcgctccttcatcctgccttctcatctgtatttcacactccccttgtgctgggcctcaccggagacctctgtcatacctcacagggctgccgccataacggcgcccccttatcagacttccttgtgcgtaggatcacctgcctgcaaagcaatggacgtttccttttggcaagctctgcagcagcacacattttctatagttattagacgtaagatactgggaaaaagttgcaaaatttatataaattttaaaatcctagttttttatagtataatagatttactttctcttggcaacccgttaaaggaaaaaagcgaaaaaaaatcccccataccatctcacactccggcacctgctgcccttctcaaggcagagcaggaccgaagttttccgtgagacagtacagggaattctctggtatttatgattcacgccgaagaaagctttcgcttttccataaaggccttagatgaactgattggtggcctcatcatagtaatagtcaatagatgccattttctccaacagctctttccggttcattccccggcaggagcacagagcttccagggagtcataataatcccgaagctgtgtgtttacataacttaaaagcattactgggtctttgggtatcattttgtaccttcctttattcttgtgacaaacgttccgttctccacatctatgacaatggtgctgcccccgtggatctcacctgccagaatgcacttggcggccagggtctccacatttttctgaaggtaccgcttcagaggccgggcgccatacaccgggtcatagccattctctacaacgaaatccttcgcctgtctggtgagctccagggacaactcctgggatgccagacgctgtgccacttcctccaccagcagatctactatattaccaatgttctcttttgtcaaaggtttaaataaaataatttcatccagacggttcaaaaattccgggcggaaatgggagcgcaggtcattcatcacaagatcctgggcgccctgacggatctctccgttttcagcaatcccatccaaaagataggtggaaccaatattggaggtcatgatcaggatggtgtttttaaaatccaccgtgcggccctgagaatctgtgatccggccgtcatccagcacctggagcagcacgttaaacacatcgggatgggccttctcgatctcatcaaaaaggaccacgctgtagggttttcttctcactgcctcagtgagctggccgccttcctcatagcctacatatccgggaggcgctccgatgagtctggatacagagaatttctccatatactcgctcatgtcaatacgcaccatattgttttcatcgtcaaacagggatgccgcaagagtcttggcaagctctgtttttcctacgccggtaggtcccaggaaaaggaaggagccgatgggcttggagggatccttgatccctgccttggagcggagaatggcatcggtaacccgctttacgccctcctcctgtccaatgacacgcttatgcagctctgcctccagtccaaggattttggaccgctctccctccgtgagcttggtcacaggaatgccggtccacctggatatgatccgggcaatctcatcgtctgtgactgcctcatggacaaggcgcatatccccactcttggtgtggcgctcttcaatctccaactgctgctgaagcctgggcagttccccgtactgaagctttgctgcctcctccaggtcatagttctgctgggctttttgaattttccggttcacatcctcaatctgctcacgaagcttctgaagacgctccacggatttcttctcattgtcccactgggccttctgggtattgaaaccatccctcagctcagccagctccttttgaagggctgccagccgctccttgctcagagagtctgtttcctttttcagggcagcttcctcaatctccatctgcatgatctttcggttctgctcatccaactcggtgggcatggaatccagctcagttttaataagggcgcaggcttcatccaccaaatcaatggccttgtcgggaaggaaacggtcggtgatgtaccggtgggacaaagtcgcagcggccaccagggcgctgtctgtgatctttacgccgtggtacacttcatagcgctccttcagtccccgaaggatagaaatggtatcctccacagtgggctcatccaccagaacaggctggaaacgccgctccagggctgcatccttttcaatgtactggcggtattcatccagtgtggtggccccgatacagtggagctctcctctggccagcatgggctttaacatatttcccgcatccatggctccgtctgtctttcctgcacccacgatcaaatgaagctcatcgatgaagaggatgatctttccttcactttttctcacttcctcaagaacggctttgagacgctcttcaaattcgccccggtacttggctccggccaccagggctcccatatccagggaaaagatcttcttatcctttaagccctggggcacgtccccctgtacaatccgctgggccagaccttccaccactgctgttttgcccacgccgggctctccgatgaggactggattgttcttagtctttctggacagaatgcgcactacgttgcggatctctgcgtcacggccgataaccgggtctagtttttggttcctggccttttccaccaggtcctggccgtatttgttcagggtatcgtaggtggcctccggattgtcgctggtgacccgctggtttccacgcacagtggacagtgcctgaaggaagcgctcccgggtaattccgtattcctggaaaattcgttttacaccagagttggcgtatttcaccattgccaggaacagatgctccacagatacatactcatcccccatggccctggcttcttcttctgcgtttatgagaaccttgttcagttcctggccgatgtagagctgccccccggataccttgactctggcgttgacggctttttccacattatttaaaaaatgttccttgttgatctccatcttttcaatcagcttcaggatgaggctgtcttcctggtgcaggaggttatacagcagatgctcctgctctacttcctggtttccaaactccatagcggttttttccagatcctgaactgcctgaagagacttctgtgtgaatttgctgatattcatacatattcctcctgtctatgtgcacagcctccgccttttggcagaacctatcatcagggttcccagaaagggcggaagttatttgttatcttgttatagttgcactataacatcttttgttagcactgtcaataggcgagtgctaattggcttataattttttattcctgcgatttcatcaattttttttcacttctaaccttttttattcttttacaatccatttacctgagcgacgatttcctattctctccaatttcccttttttctgcaatttaggaagcagtctctttatcgtgcccaatgtaatacctgttatttcatgcagctctttttgcgttatatcagccttttcttttaaaaccaataatatctttttctcattttcacttaaattagatgcatcagtctcagaattagtcgcattagtcgcatccatttctgagactaatcgaggatcaactactccgtgttggtcaaattccattgttctgcgatacagatttactctgaaatcactatctaaatctatcagttcaggttcgggcagaccatacacttttgcttcatcaaacatctttggaattccactaccccaggcttcaatcaggttcatataagcaaaggcttccgctatagctttattacgcaccttagacaagccagttttcatcttttctattgtcaggtcatggtctaacatccccggagaagtaacctccaaacgatcatcgaacaatgcaacctgaatcttatccggcgacaagtagctcctatggcatacagcatttgtgatgatttctctgattgtacggataggtaattcataaatatcctgcctggcaagtccatcaattctcgcaccaaggttaatatgctccagaacaaaggcataggtggactcaatctgctcgtcgatgctgcctttgaattccttacgggtgataaaaatatttctcacagttcccttaaacactgcacattggatggatgcacctggataatcatccaatctaccgtctatcaactgatagccattcgtagcataatattttcccttttcctctaatacaagtttataagagagcaactgatttttccctatctttttcaaagaagttttatctgcatctgtattagaaagctcctgagcgtgatgatacaatctgtcacaaaactgttccatttctggctcagacaattcacgtcccactctttgctgatcgaaactgcaatttccagcctccagaatcatctcctgaatctggtatctggcggctttgcgggttgtccctgccacgcgaaggtacacaccatcaatcattccctgactttttaggcagtagggacgctgcataccagacgggacatctacaacgataatatactttccatctacatcctgaataccaacacctggcgcaatcttcggatcacagctatcgtaaatcgcatttgtgattgcatccattttccgaaagacttcttcttttgtaaaaccggtaactttccaggtatcattttctactccgaaaacgattcttccacctgaaccatttgcaaaagctactacagtcttcatataattttcgcttttaatcggaatttcttccttgaactccaaattatccgactcaccagcaaaaatttcttcaatcgtcatgaaatcacctcctagttctcaaacacaaaaccaaaaagcccctatttacacctgttcattcgcttcctatcactcacaaatatcacttttccctgatctcaaggcccttttctcaaagaattctttaagctcttcctctctctcctctgaaaagtccagcagcagacttacgtcaacttcaagtgcgtctgcaaagcggtacagcagctccagggaaattggagtatacagacgctccgcttcgatgttgctcatgtgggtccggctgatgtccacaacctctgccagagttaactgactgattcccactttcattctgtaaaaagcaatatttcgtcccaaaagccggtatcttcgttcatgcttaaaacagatttcctcttttgtttcagccacttgactttttctcctctcttctcacaacagaaatagggcaagagatgtctgccagaccttcctgccctcttcttcccatgctgccctgttctaaaatcactgttcaggctgccagtttttacaaacatccacccattgaccacttccggaatacttctccatttcctccatggtgagtcctatggcgctgttgtcacttccacaggcagggtagaccatctcgaatcgcttcatagactcgtccaagtaaacctgaacaccctccttgatcccaaagggacacacaccgccaataccgtggccgactttctcctccacctcatccggtttcagcattttcgccttggtatggaaaaaattcttaaatttcacattatcaatcttggcatcccctgctgtcacaacaagaaccggtttctcctccacggtaaaagacagggtctttgcgatcctggcaggctcgcacccaacggcttttgccgccagctccactgtggccgaggaaactgcaaactcctgaatccgatcttctaaaccatattgcttaaaaaactcccgtactttctcaattgccatttacttacctcttttcatccaataacatcctgttaataaagtcttctgttccatcattttactctatcttttggaaaaagtaaaagtatgatttttctatctttcatcatagacaattccttatttaattgcaatcggattataggaaaatttttatacacacaagacagccgcttatgtgaaagaactctccgttccctgcctgtcccaataaactttccgatatgttttcagtttattaccaatgatcagggatcacaaagctcccttgggttgggattccctatagaattttccccttgattgtgatatggtaaatccaaagaataggcgcacgccgggagatcaccgggtgtcaattgactcaagaatccactccaagggaaggaaaaatcttatgaaggaaaaactatataccataccgcttatggacgcattcaaggcagaggatgaatgccccttctgctttatcgaacgccagttagagcagcacaccatggactttgtcttaggctccggagcctcctacatggaggatgatatccgtgctgagacagacaaggccggcttttgccgcacccactataaaaaaatgtacgaatacggcaaccgcctgggaacaggcctgatcctgaaaacccattttcagcagaaatccaaagagcttcaccaggagatccagaacttcactcccggaaaatcctccatgctgggccgcctgaaaaaaggcaaggctgatccggatgctcctaagaccagccttggcatgtgggcaaaggaacagtctcagtcctgctatatctgtgatttttataagaaaacctatgaacgatatctggatacattttttgaaatgtttcgaaaaaacaaagaattcaaagagctgtttaggtccagcaaagggttttgtattccccactttggagacctggtggaaaccgccgaagtccagctctctgacaaagagaaaaaagaattctatgacattctgctccccatgatggaaacaaatatgaagcggatcacagacgacctggactggttctgtgacaagttcgattaccggaacaaggatgccgactggcgcacctccaaggacgctctgcccagaggcatgcagaaggccgccggcggctatcccgcagacgagccctatgtcatggaccggtgatcatccagccaggctctgccctgcccacacagccagcaggcagaaaaagaagcttcccgctgcatacatacatccccacaggccctggccgttctgaaataaggtcagggtctccagggaaaagctggaaaaggtagtaaagcctccgcacagccccacctttaaaaacagcaccagactgggaggcaggccgccctctctggcagccgcaccagagatgatcccgatcagaaaggcccctgcaatatttatcaacatggtcataaaggggaactttgtcctggagcacacaggcagaagtcccagcaaatatctggccgaagccccggcaaagcctccaaggcccacccatatcactgacggcataggattttcccccttctctaatagcttctcagctcatcacttccgtcatccactgtattttcaatggatctgatcaccacattgtatccgtagctgtcattgacacggacctgcactctgtccccaacccggtgtcccataatggccttgccaatgggagattcgatgctgatgcggttttccagggagtttccccggatggaggtgaccaccttataggtctggacctcgtcatcctcttcaaagtacagctccactgtattgttgatccctacctcgtcctcttttgaatcctctgacacgatctgggctgttttcagcattcgttccagatagcggatgcggctttcatttttatttttgtccttttttgcagcatagtactcaaagttctcgcttagatctccgtgagcccttgcttcctttacagcctcaatggcttcctttctcaccaccagcttccggtattcaatctcttcctgaattttttcaacatcctttttcgtcaactgctcccgcatgatcttccttctttctgtcttcttttcatacttttctaacaccattgcattatgcccaaacctgcagggctttgtgcctaacggactttcctataacataaaatacagccagccaagtgcccccgcctgaatcaccagcagagctggaatgccccaggaaaagcttctgtgtctggttttgtgatgaaagagtctcatccccaggaacgctcccagagagcctcctgccaaggcagccaggaataaggtcctctccgggatcctccacctgccccgtctggcccgctgcttgtcagatccatataaaactatagcaaaaacattaataaatagcaaatagaactccaatagcctcattttccctcccctttcccagtgaatccctgtatgcatggtcccgcctgcataatatcgccagaaaagcagggccctcttgtgatctctggattttaagaaaacccgccggtaccctttggccacggcggatttactcatctttcttttcctatacaatatcaggcacagtcagcgccatgatccacagggcattataatcgttaacagatagaaaaccccatggctatatcttttttcacatcactctgtaagcctttccccctgctaggactgcgtctgtatatttccgctgtattccccgtccaccagccggatcacgcctttttccaggcactgtacaaaagctctggccatgcctgggtcaaactgccgtcctgcctcttccagaaggatctcctgggcagcctccagggaaatggctttcttatagcagcgtttggaggtcatggcgtcaaaggaatctgcaatacacagaaccctggccgtggctggaatatcctccccggcgatccgtctgggatatccgcctccatcgtaacgctcatgatggccgatcactgcagggatcacatagtccagggaaggcagatggcggataatgctgatggaggcctccacatgacctttgatgatctcgtactcctgttctgtcaggcagcccttcttgttcaaaatattctccgggataccgatttttcccacatcgtgaagcaaggcggactggcggacaatctccaccacatcttcattcattcccagattcctggccagctctgtggcataataggccacattgttggaatggctgaaggtataatgatccttggcatcaatggccgctgtgagggcatagatggttgattcatattcctgataaatgtgggcatgggtatctgccccttcctcctggggccccatcgcattctttaccatggtgtcaaataccttgatgccgtttttcccattgtgcttcacatgataaactgccatatctgcattgtccataagctccttcactgatttggccccatagggggcggcactgatccctgcactgacagtaatggccttcagcttatagtccttggagaagcggttcatatcataaatctgtctgcagatggattccaccagatttttcgttgagaacacgtcatatttgggcagcaggacagcaaattccttgccgctgtacctggccgcatagccgttgtcccccacgctgcttctgatgatatctgcgatccttttcagacaccggtctccctctttttccccatagagctggttgaacagcttgaaatcatccacatttaatatagccagggccagggagccctctttgttcttttcaaattcctcattgagcacctggtaaaaatatctccggttcaaaagtccggtcatctcgtccgttcttgcctccagataggcttgttcatagaggcgggcattttttatggcaatggaggacacggaggtaatggaagacagcatctgaatatccccataggatatggagcccttatttgcctttccggtgagcaggatgatcccgatgagctcatccccgtccataaggcccacgcagcattcaatcttcttcttttctaactggtacttttcattctcccacatggacttatattccacactgtagcggaaatccttgaaaagcaaaggctcctcatgtttcttcagccagagcacaatggggttgtcctctgccagagaaaaatccaggtcatttaaaggcttgtcgctgtacatggcctgataggttcccagcccgcccttctgcatgcagatataaatactctgaacccctatggtatccttgatcacacggatggatgcgtccataatatccttgagccgcagagatttggacacggcggaattgaatttctgcagcttttccgcctgctgcatctcctcttttacaaatacatttctcaccagacacttccagatcaaggtgacacaccagtaggtggcaaagaagaacagggcaaagatcagattgtaatgtggctcggacatggagaacacatgccgcacatatccctgaaaatagggggacaggttcagaaacatcaccagggcaaacaacagccccactccataccccacactttccgatgccagcatgtgaaggcggaacagccgtctgcggatcaaagcataaaaaagcaggcaggcattgatcagcccacagagaatatcaatgggaaagcctttgaaaaacggcaggctgatccccatatttcccaaaaacaataggcagattcccagaagcactgggttaaactgggcccggagggttttattcttcctgcacaccttcagaaccgtgagaaaaatctgggtgagcagcaccgctgccacaagaaaatacactgccaccttcaggtccacgtcgtacacaaaggaacggtgtgttccctgcaccacaagcttgggatatttcagcagaaccccgcttggaatattcactgcaaagcacaaaagcataatgaagacatatgcttttcccagaaaaccgttctccacaccggcaaaggcattgataaagcggtaatatgcataaggaagaagcagaatcccgcacaaagacacgtgaaaccaaaaaatataggagggccagaagtctatgcgcatgagcacagagcctcctgtccagcaaatcattcccaccagcacgatcaggaagctgttcaccagcttatccttcttggctgccagaaatataagaaacataaagcaatagcaaagcattgcaaaaatcgatataaattggtatgtacccataactacttcctcatcttcgtgctgttaacttttcctgtacctgaagtaattctgaaagctcatagaaagggggactcatgtgccgcagagtcttccctgtactgcgggtataggcatcaaagcttccacaccgaagaaccgtaacctccagaggatccatccccagtattttcttcaaatcccggtaatcctgatcgatatacttaaaatacgtactgagcagatccttcagaatctccgtgctcatggcctgggtggtgagcgcctccctctccagctccacatacatatgcagatagggcctgtggctgtcattgtattccttcagtgctgtccagttcttaatgggcagcttggacagttcaatgacgctgctgataccattttcagaaatcctggtaaagcctgcaatatctatgatccagggaacccggtccacatactggaacctggggatcctagtttcatcctcccggttttccagtcccacgcagcggtacatatccccgcagcggtaacgggcaaaggctccgcccttaagcacagtgaacaccagctcgtatttttccccggggatcacctcatccatgagataggtctttggtgtgtaggagggatcctcataatttttcagcatgtcccgctctgtgataaattcgtagaagcaggtgtccggaaagaaatacatcccatttctcgtccaggtctctgttcctatgatggagggctccgttcctgcaaacagctccatgggacggatcccccacagccgctccagatcatctttatagcactggttgtctgtacccgccaccataaagcccttcagcttgaagagatctttgggcattaaggcgcgcccctctttcttacactgacgctttgccaacagcatccgccagatcatgtggggtctgcatttcagcacatccgacaggctcagggaaccgcctgagccggacatggaggaaaggctcagactcactgcataagccacacttcccaggccgaagaagaattccaggtccttcttcatggccatcttaaagcccgccttgttcctctggctgaagctcatgttcactgcttccttcacaggaggcaggaaggaaatgtcgatgtcctcccccagagccagagggaacaggcctgtggcataaggaagaggggccagtccatagaggatcttgtccgtgtccgccacgtcaaattttcccttctcattgctggtggacagaagaagacaggccaccacattgtttcggtaagtgtccagcatacttcttgtataaggggccaccttcaccggatgcttccccccttcccaggtggtctgaatccagataatgggatttcccggcagggtttccgtgcgcttctgcaggagaatgtctgcataatcctcataggtggtcagagggaccatacttcggaattcatccagggtctttgggcagcgtccctttaaaatagactgtccaagggggcagccgctccacagcctgatctgctcctccatgagacgcctctggattttcatatagccttccatggtcaggtccagaaatccacagtactggttccaaattttatcatattcctgcttcttcagtttttccttcagattcatcgccgctgccctccatttttcctcgctgtcctgataccgtacgttatgcttgccctgttgggaatcaaaaatggcgtcgttttcttgtattctttataatttgtaaaggtttttggaaatgtccagacatcctggaataaaatgtacagcaggttccaaacgatcatagacaaagaaaagatactcccggactgtgtaccccagatccccatcagacagagatacaggccggcaaaccacaaaacacccgggtggcggcacaatccgtacatcccttgtgtatatgctgttcgaccggcgctgtcctccacgtaggtttccttaaagggcagtgcaaagaaaagtgtatacagaagcaggcacaaaaacagcaccgctcctgccgcaagtaccagattccagaataaatgccccttccacgtggaaaaatcctgccaagtctgcaggaccgtggccagcgcagtcagcagactgcctgccccaaagcatttctgaagaatccggttctggaaccgcacgctgttccagtcataaataaaatacaatacaaatcccaatgttcccaagctccaagtcagcatgtattgccctataccccttcgtttcgtgccatataatatactaagttaattatacaggattttagattctccttcaatccacaacagcaatttattttataaattttttagatcgttcacattgatttcaaaataacaaagccggactttatattttcttttttcccagccggacctcctccatatagtctgccagctcttcctccatggagtcaaacagataatttctgctgctctgtcttctgtttaagcattcctgacggatttcctcctggatgagcttcagctcctccctcagccccgtggctgacagaagacctgccccctgtccggttatgatgatctgctccaggccgtctgaggtggccactgtcacatggtattttctggccatctggtgcacggttttttcaatatactggtctgcagtctcagcctcctgggtatagaccacataaatattatgatacttcacgatctcacatacatggccctccacccggtaggcatcaaagactaaaatcactgtattcttcttgtagccctgataatttgacaataggtccgccagcttgctcctggccgctcccagatccgcctttgccaggtccgccagctcttcccaggcaaatataatattatatccatccaccagaaggtattcctgtgccggctgctcttctttgtgtcttctctggggaatctcctcagaagccgcggttatggtgcgttttcccggtgcccggtttttctcccgctttattggtccgtaggttctctggaaaatttcctccagctccttttcgtctgcccagaagtcccgggaacttccaattggggactgttccctggcaggcaaaacctgatcttgcgggccgggctcagaaaaagacagaccggtatccacgtgcatataatcccgcacctgatcccagctcaccacgaaacctgctccgtgggaacagaacacagaccctgtgggattttccagatctctctcggaatcataggcaatggcctccagaacctcttcctcattgtggcagggctcatagccttttaaggtacagaacagtctaccctgcccttttgtgtaggccgccacctgggtttgataatctctcatatgcaccaccggggcactgcctgttatcactgaatactcgccctgaatcaagggcggctggaaaaggccatgcattctctggatatctgaaagagcacggcccacagtctcacagggtacctccagccggaactgatataccggctctaaaagtctgcacctggcctgctttaagccctgacgtacagcccggtaggttgcctggcggaaatcccctccctctgtatgtttcaaatgggcacggcccccaataagggtgagcttcatatccgttatgggaaaacctccaaggacgcccacatgctccttttcagccagatgggtgaggatcaggcgctgccagtttctgtccagcacatcctcgctgcagattgtgtcaaactgaaggccgcttcccggctcccctggttccatgagcagatgcacctccgcataatggcgcagaggctcgtagtgacccacgccctccacaggctccagaatggtttccttgtatacaatattacctgctccaaagtccacatccaggccaaaacggtctttgatcaggctttttagaatttcaatctgcacctcccccatgacttgggcatggatttctcccagccgttcattccacacaatgtgaagctgaggctcctcctcttccagttgtctgagcttatccagggcagaatgtacgtcacagtcctgaggaagacggatctcataggtaaggaccggctccagcaccggtgcctgggcctttgcttctgtcccaagcccctggccgggataggtgtgggtcagtccggtgactgcgcagacagcgcctggaaatacctgggccgccgtctcatattttgccccggaatacacacggatctggtctgccttttcctcccacagatcctccttttgaccggagggcggctcccctggctttgcgtttgaaagaagtgcttttaccttcaggcttccccctgtgatcttcatgtaggtaagtctggccccctggctgtctctggcgattttaaagactctggccccgaactgttctggatactggggacagaccgtgtactcatccagcccctgcaaaagctcctccacgccggtgagctttaaggcagagccaaaatagcagggaaacacctttcgttcctttatcaggcggctgatctcctccctgggcacctctccggtgcccagaaattcctccaacagggcctcctcggtgatcgccaggctctccagccactcctcctggctgcgtccgctgccaaaatcaatacagccctcccccagcctctctttcagttccgctaagcggacatccttgtctgtgccctcctggtccatcttgttcacaaatagaaataccgggatctggtatctggccagaagcctccacaaggtcatggtgtgtccctgcacgccgtcggcaccgctgatgaccaggaccgcataatccagcacctgcagggttctctccatctctgcggagaaatccacatggccaggagtgtccaaaagggtgatctgcgtgtcccccatagcaaacacagcctgcttggaaaaaatagtaatccccctggcccgttccaggtcataggtatccagataggcatccccattatccactcttcccagcttcctgatctttcccgtcaaatataggattccctccgacagtgtggttttccccgcatccacgtgggctagaatacccatgcatatttgcttttttcctttattttcagatgtatctcccatcgaatttcctctttcttcgttctattgcgtacaatttacaatggtttcagtatatcacatcttttgttatccttccacacgggattccctgaaaacacagccaaaaaacccgcacgggaggccattttgcctcctatgcgggttctgcttctttatttcactgcctcaaaagccagctccaggtcctctaaaatatcccggatattttccgtcccgatggaaagacggatggtattgggaaagattccctgttccttttgctcctcctgggtgcactggccgtgtgtggtggtggctggatggatcaccagagatttcacgtccgccacatttgccagaagggaaaacacctggagatggtcaataaaatccttcgccttctgggcatctcctttgatctcaaaggtaaaaatggagcctgccccctgaggaaaatatttctcgtacagtgccttctgggccgggtcctgagatacccgcggatggtgcacccgctccacctggggatggctgcttaaataatccaccacctgcaatgcattttccacgtggcgctccacccgaagggacagggtctccaggccctggagaagcacaaaggcatggaagggggaaagggtggcccctgtatcacgcagaaggatggctctgatctttgtcacaaaggcggctggccctgctgccttggtaaagctcacgccgtggtagctggggtctggttctgacagagacggaaattttccgctggcctcccagtcaaaggttccgctctccacaataatacctcccagggctgtcccgtgtcctccaataaatttcgtggcagaatgtaccacaatatcagccccatattcaatgggccggatcaaatagggggtgccgaaggtgttgtcgatcaccagagggatctggtgcgaatgggcaatctgtgccactgcctgaatatcaacaacctccgaattgggatttcccagagtttctataaaaacagcctttgtattttcctggatgcttttttcaatctccgaaaggtcaaagggatccacaaaggttgtggtgatcccgtactggggcagggtgtgggccagcagattgtaagtgcccccataaatattcctggccgccaccagatgatccccgctgtgggccagggtctggaaggtataggaaatggcagccgcccctgaagccacggccagcgccccgctcccgccctccagagccgccattctcttctccagcacctcctgggtgggattggtcagccgtccataaatatttcccggatccaaaagtccgaacctggcggctgcatgatcacagttctggaatacataggaggacgtctggtaaatgggtacggctcttgctcccgtggcagggtccggcgcctcctgccccacatgaagctgcagggtctcaaatctgaatcttttctctctgtccttggatataatgctcataattgtaatcctcctcgtttttcctgtgtgtgggacttctatcctggagccagccaggctgtgtattcattttacttatatatccctattactcctatatgttaagtaggactatagcatccaaacccctgcttgtcaatactttccagtaaatttaaatacagcctcccagcacatatcctcaagtagccgccttacagaagaggcagacagagctccacctgatagaacccctggaaatcctggacgttcaggcttcctccctgaagtaccgccattttttccgagcttttcagtccgatgtgattgctctccataaaatcctgagtttccttcaccttattttttaaaacgatcttgatctccttttgcgcaacctcccaggaaaccaccactggttcctttttgtccccatacttgataatattggaaaacaggttgttaaaaacccgtttcaacaaggaggtatctccctggatctccccctggcactcttccagagcggtctgtggacaaaagcctgaaagacggataaaatcacagttctccaggagcatatcccggacagcacacaacggaagcctctccttgtggaccgtctcatctccttcatataccagggcatattcgaacattttatctgtcataacccggatatcactaaccttgttcaggcagcgctgtacatattcctcccgcatactttcatcctccagcctgcgcttgaggatttccagatagccgttgagaatggtaagaggggtgcgcagatcatgggacatggctgtgatcaggtcccggttggcccggtggctttcctctttttccgtcatacttttatccagggccagccgaaggttgtccagctccctggctaatactccgatctcgtcatttcccataaagggcacctgacaattaagatttccgccggccataaccagaatctcctccttgagctctgccacctttttcatctttttccctataaacctcagaaccgggatccagaacagcaggaagcttagaaaaaggcagacgtacagatagggatacacaattaaggatctatgataagaatacgccattacatcggctgtaccgtttaagaactccacttccttatttacgatccgttctcccactctggtgacagcgtatgcactgtcaaaaaaggcgcgtcttaaggaatccttcatcatgtctgcatactctcctgtcagatatctccctgtatccttggtatatacatacagacttgtataatcatcccgaatgagaaaaaagggagccattttctccactgcctctatatcctcctcattctctggcaggttgtatttcactgcctcctgtcttacccggtcccagaagttatcttcatcccagccaataccaaactccctctgcatccaatcatacacattgaatttttgtccccaggtaaacccaaaaaaggcaagtgctacggctgcagacagcaggatcacccagaaaagctgcattcttatgctccaagaatgtttctctttagtcacagcgatacccctttccccatacggtttttatcattacgggattttgcgggtcctcttcaattttcttccggagattccggatgtggaccatcactgtattgtttgccccataataataaggctccttccagacagcttcatagagatgctgcgcggaaaagatctggcctggatggccggccaaaagtaccagaagctgatattctgtctccgtaagctctgtgagctttccaaaaacaaagacctgtctgtgtttttcatcaatatccacatgacggatgtgaaggaattgttcctctgtcctgacgtcctccttgcccttatagacctggtatctccggatcagggccttcgcccttccaatgagctcattgtaggaaaagggcttggcaagataatcatccccgccgcttaggaatcccatggtcttgtcactgtcctgggatttggcgctcaaaaacaaaatcggggcattgctgatctttctgatctccacgcatgtttgataaccatttaaattgggcatcataatatccaaaatgatcagatcaaagggacgcagacggattttttccaatgccttttcaccgtccttggcctcctccacctgatatccctctccctccagaagaatccgggtaacctcccgaatctctggattatcgtccacaactaaaatataagattgttccatttttatgatccttcgtgtaatttacaaattttctgctttcatatctttactttattatacatagtttcctgccccgctgcacatttcttaagaattcttcagaaatacttacatattcttaaaagaccttaataagaactttggggagtattttagctttttattataagcttatcttaaagtaattactgtttcaaatatttttgaatccaaatctgaaatcacctcgtttttattaagtaactgtaaaggagatgtaacaatgaacgtaaaatccacatcggtccgcacaggacgggcggtctcatatgaaaaaagtgtggtttcctccaaacgctggacctttcccacttacccatttttactgatcttaatattttttctgctggtagccttgtccgtgccagtgggatgtgtatatggttccaatactgactggctcagccagcatgcggccatagcccagaccatccgggaggcctgtttgaaggaaaataccctggcccctgcctttctcagtctgggaggcggcagcaacggatatttgttttcctattatgggtacttccggccagatgttctcattggctgcctgtttccggagatttccatggaatggattcttatgggatatatgctggccgggttcctggctggaggacttttgttttataagctgctgcaaaagcatgggacagagccgcttttcgcctttttgggaagtgttctgtatctcacggccgcctgctttttccacacccacaggcagattatgtttgtgaattatatgcccttcttcctgggcgccctgttggctgtaaaaaccaagaagacccagtggctgcctctgcttatggcccttgtttattttcacagcttttactacgggcctgtgtgtctggctgtacttttctggtactggtacagacaggaaggaagctttggcttcttcccggcctatgtaaaaaaagccgccttatccgtggggctggccgccatgcttctgcttcccaccgctttggtgctgctggagcataaaaggacctcccaggcaggaactggaacatccctgcttcctgttgacctttccatgaacgctttgctatacagcccctatggcatgggactcaccgcgatctgtctgtataccctgcttctgggactcaccttaaaagagtaccaaaaggacagtttggtttacctgctgtgcatcatctgcccagtggcctcccttgtactgaacgggggactttatgcaaggcctaagatcctcatcccctttgtgcccctggttctcattgagaccgtgagcatccttcaggatgcctggaggaaaaaaatcaccctgcggctgtggcccatagttcccaccctgctcctcacctgctgtacagcctattacaaacacgccggcggtcctgccatagacggtattgcagccgccctggttattatagggctgatccttttttcttccatggagaagagattccgcctgccgcgtttcatccccatggtgcttcacctgtgcctgtgtattatgccctgtattctcttccttaacacagcccggaccgatgattttgtgacgcagaagcaattgacagagctggattcccttgaaaagtcagcagcctatattgacaaggtaaacccctcctcaaaagatgacctgtaccgcaccgacagcctggtggctcccctgaacacgggaaaccgtctgctgtcctccaatggccacaaggctaccatgtactcctccattagcaataagaattacagcgagctttattataacctcctgcacacccccatccgcattaacaaccgggtggccctgctgagcgaatccaatcccttcctggagcagctcttggggatccggaccctttggaccacaaaagataagtttcctgcaggttacacagccaaggcctcggacggggacctggtgctggcagaaaatgcctctgtgctgcctgtggcctacaccacatctgtgtgtatgggacaggaacaattccagaagctttcctatccccaggatttggatgctctgagccaatacaccattgtgccggaaaatcgtcccgttgcctacaaatctgagatggagagcttccgtcccagctttgcacccataaagatcccagacaccgtgaaggtgtcctctggccaggaagcagcttcacttaattcacagaacaccaaggcctcatccaaagagacatggagcctaaaggtaaaaaagaagaccaccctgcccctgccctttgacaaacctttgaaagacaaaattctcctcctgcagtttcaggtagcctccaaaaacggcaaggcggtcaccattgacgtgaatcatatacggaaccggctctcctccgtaaaagctgcctatccaaacggaaaccagatattttcctaccagatttcccctgacagcctgggggagatcaagggacttgagcttgtactgtccaagggcagctatatgctcacaaactttaagtggtttacctgtccggtctccctgctttctcaaaaaaaggtgcagcctattaccctggaaaaaacccaggaaaatgaaatcctggcaggaaccatttcctgtgaccaggacggatattttgtcacctccatcccaaaacaaaatgggatgaagctgttcattgacggacaggaaactccgattgaaactgtaaaccatgcctttgctggagcccagatagccaaaggaacccatcaggtgcgcctgcagtttacggtccccggacaaatggcagggtatatgctcagtctggccgccctgctctgcttcctggcaagcctttggctgtcccggaaaaagcagtataaagattgatatcttagtcaggcgcataacgcaaaaagaaagagacggttccctagagcttccgggctttgaaaaagcccgaatactatgggattgtctctttcttgcgtgtcagggggcaaaaatcgatattaaccgatagccccctgtctctgatcatttgatctgattatttggtctgattatttaatcttatgattcttcccgttacattttctgtgaataaatcattttcacgatccctgcaaaaaccatctgacatacggctgcgccaaccaatgtgtaaaaggcagtggtattaaaatatcccataaagatacctgcaaaaatcatcgccagagaagttatgagaatcatgggaagacctgcttttgccttgatggctctgcgtctctcgtcattttcctgatgaaagaaaagcttcagctttctgtcatcattgagaaccctgttatagcgaaccaccatgaaaaggagcagaaactccaatcctatcacaacacccatctgaaattcgaaaataaaattgtctttgatctcctggggtgcccaaaaaacatcgtatattcccagtgccacacaaaggaacacaggaataaaaataaaccgcatccttcttcttaaaatccttctgtactcttccataccctacgccctctcctcctcatactcagaaaaatcaaaaacctcctcgatctgcatcccaaaataatgggcgatcttataagccaggggaagggatgcaatatactttccggtttcaatggaagtgatcgtctgcctggttgtgcctacggcaaaagccagctcctcctgggataattttttttctttgcgaagttccttaatttttgtctgcaaattttcactccttgtgatctgcccgcaatggtgtttacgggttttttcaatttttgatcttcaatatgttgaagctccagaattagcgccggactccaacacattcatgtttgtctcttgacatgaaatatatagtatgctttgcagttttagtatagttcactttgcagtatttgtcaagcaggctttgcatttttaacaatatgtggttcggaattgttgtttggaatcactgcgacaggaaggaagtattcccttccctttgaaacataagtaaaaatcctactgccaggagaagggcggctgtccaaatggctttctcccccattcttccgctcatcagggctcccactgcagctcccaccgcaaagatcaagataataaaataataaaggagacttttccttttcagttccttgtccttagtcaaatgatatttacacagaagctctgtggcgcttctcatgttgccgatgcacatagtggtggcacaaggaatgccccggaatttccgaaagctgttcacctgcatagcacagcaaaaggacatcagcacatttgccagcacattcaggctctggggcatcagacccacacacagcaaaagcagcgcttccgcccccaaaaccatctgcctccaatgaattttttcaaattttttataggaaaaatgcacccactcagtcacatacaccccggccagaaaggcccccaagggcatgagatagtgaagggcatcctgccagtttcccacagccagattctgtcccagcagcacgatattccctgtctgggcattagcaaacaccttacctctgcagttataagaataagcatcctgaaatcctcctgccaacgtaagaaaaaccgccagcgtcatagattccgacatctgtcccttttcgtttatcagtttcatggaaattatacctcctgtatgccgcatctttttatattctcatgtattcatcagtagaacccccaactccgtgttcctttttgtctagccccggtcctgccgagtatgattatatcataaactgaaagatattctagaatatataccttaatgttttacttcatccaaggaataaaataacggctgcccccacagtcaacaatttccaaccagccatttgacctgccttcaagggcaggtccaacatctgcaatatttcggaattgccgggcaagatagtggccttgccgccatccctgtaatttgataaggttaagccaacgaaagagaaaatcccgggcctggatatgatccttccaaaaccaaattaataaaaatcaggaggttcctatgaaaaacaaaatgagaaaaataactggtctctttatgtgtgccgcaatgacagccggattaacggtcacagcttttgcaggagatgacacagccagcttagatgacatcctgcgaattgatggaaaaaccgggaaaatctatttggaaacagatgaaaacggttcaaattatcccctaaaattcctatatgacaccaacttctggtatagacaggattctgcaaaccctgcgcctacactgggacatgtaattaatttcctttccattggaagacaagaagaatttgcaggcaagccccgggtagacttaaatcaatttgtcaacagtgcccttggggagaaaacagccgagatctggtatccccatatgttatatgaagatcaaatggctccaggcctgctggactactgggctgaaaaaggtcttacgaaggaggcttactggaatgacccggatgtagatgacggaataagcagcgattattttgtatatacccctgccgcagctgaacagcctgacagtggatacccccttctccttctcttccatggcggcggagaggctgcttatcaaacagaaactttcggtttttgtgatctggctgcaaaagaaggaattattcttgctgcagcagaggacactggagacgcagacagtatgaatgccatcatacaggctgtggaaaccaattatccggtagatccttcacgggtatatgtagtgggaagctctgccggcggaagcggcgctaccaagttctctgtggataatttaacccgcatcgctgctgtgggagtaatggatcagcctgttacactctctacaagatggtattctgccacagatgaaaacatagccgaaatgcaggaaaaaatccttcctatggtttgggtaggaggaactgcggatatgtatggtcttcacggcctatacagtgaaggtctgcatcagtctcccacaacagaattctttgagaccagtgaaggaaatgaggatcagtttatcagtggctggaatcaggtaatgaaagccttcaatattgaaggcaaagatatcacctcccgtctggacttcacagaaaacccctcaaactatgctgaagaaatggatgggtatcccttcgatatagtagaaaatattgataccacagggacaagtccactctataaatgtaccatgaccggtacagaagatatgtgcctttatctggtggaaaaccgtccccatatgccttgtggctttgatgccgaaaatatttggagctttctgtccaaatacagcagagacctggagacaggcaaaagtgtcaaagccatgtagacaagcagacagaaacaagtacctgctttgttcattgattttccctgtttaattacattcctagctgcagaaaagcaaaacattatgatataatcttaatgacagcttttctgcagcttttctcactataaaaatttcacaaaaaggaacctgctcttatgagaaataaaagaatcccccagcttctcttccttaccctaagtattgccttgctatcccttacgatcaatttttaccattcccaggatcctgggggtgaatatatgccaaaggggcctagatatgtgttcttagcgcctaataataaagaaaccttctggtgcagtattgccgcaggcgccaaagccgcagatgagacgtttcatacagatacccttttagtagagtattccaatgcaaaagacatccgctcttattttgaggatgcccttctaaccgaagctgacggcattatcatgaaggggaccaacacaataaatgaagagatccaggaagccgcagacttgggaatccctgtggtcttttatgacagtgatgtcccccaaagcagccgttcctgctatatcggtgtaaacaactatgaaaccggcagaaaagctgcccaggtccttgtgaatggcctccaggagcgtggtaagatcctggcaattgtgcgttccaaatcagccttcagccaagaggaccgggttgctgccctagaagatgagcttcatgactatcctgatatagaaattgtagattacattgaggattcaggtgatgccctgatcttaaagcagaatttactacatgcggtcaaacaataccaggatctggatgctatcctatgcatggaggaaactgcttccaaccatgtaggaaatcttctgaaagaaaataacatggatccccaaaattattatattgtctccctggacttcacggagcagacagcagaatatatagaagacaatatctatgatgtggtagttatgtatgatacacgtcagattggttatcaggctgtaaaatttctggcccaggaaccaaccgcaccagctgataaaaaaaccatttacctggagaatatagttattacaaaggataatgtaaaggagtgcaaagactggcatgaaaaagtctcgctggaatggaattcctattaaaaaaggaaaaaatattgaggaccgggtaaattattactgcattctattgttatgcctaagcctgtctcttggcgtctgcatgctttttccaatccgggttttcatgaataattataacaaagtgatcgacagcatttactgtctacaggaaatgtgggatgacttgaaaaatatgcaggatactgccatagaatatgtactgctgggcacctctaaggaaaaatccgcctaccagatttcacaaaagaatgtatccctgtattgccaagagctggataagctgaatatcggaggcaattttcaccgcaaccttagcgacttaaacattctcataggacattatgatcaacagctggaattgatcatggaggcatctgcttcttcccacaatctagaaaagaccggtgaattcaactctgtatcccctccttctgatatctatacagctgtccgaaacaggtatcagatcattacaggcgaagttcaagaatattttcaacagcaacgggaagttatgaacagacagctgcaaattctcatctatttattaatcgcattttttgtcaccgggctttttttaatctggcaaaacacgactatcctcaccaaggaaattgtagttcctttaaaatggctcactcataaaaccaaaactgcatgggaacgctcagaaggaaactctcactcctgcctggaaacagaatgggaaatgcccggacagcctctggaggagattcagattttacacgattctactcaggaaatgatgcagcgtatccaagaacagattgcccaattaaaggaatccatggctgttaaggaacaacttaaggaacaagagctggaaaatctccggatcaccaatctccttacactcagcgaactgcattgtctccaaatgcagataaacccgcattttttatttaatacattaaacatgattcagcagactatctatctggaccaaaaagaaaaaacatcccaactcttaaaagaaacagccgcttttcttcgatacagcctggattacatcggaaaggatgtaaccctttatcaggagctggaggcgttaggaaattatatcaatctccaggaggaacgtctgggggaccgtattctgtttgaattcatccttgatgaacggctaaaccagtggtatgtgccttgtctcatcctgcagcctttggtggagaacagcatcattcatggtatgagccaaaaacgtgcgggcgctttgatcacaatccgcacggtgtttgacgatgaaagcggaaacggttatatctatgtttccgataatggtcagggaatgactcaggcaaaactggaagctttgaaaaaagagctgttcaccgacagccaaaaagcggcagagcgcattggcctccataatattgcacgaagattatccctttttaaaaaaggacatgaagaattgaaaatagacagccaggagaacctggggaccaccataaccattgtactttataaccaagcgaaggagagttttgatgaaaattttaattgcagatgatgagaaattggaatgtgacgcacttgaaaaaatgctgcagcttcattttccagagctatctgttctgccaagtgtctatgacggactagagctggtaaaaaaggtaaatacgtattctccagacattgtcattgtagatatcaatatgcccaatctggacggcttggccgcattggagcttcttcataaagaccaccggaaaatggaaatccttatccatactgcctacaacaattttgaatacatacataaagcattgaaaataggagctgccgactatatggtaaaacctgtttttgaggatgatttcataaaaatatttaaaaatgtgctgaaaaaagtctatgataaaaattctgaacctgtaagtcttccctctgctcaaaaattgaaagagcatatgcaggttgttaccggtgacaacattatgatgggacttttattaaaccagaaggactccagaagctggaaaatgtctttaagctcacttggattcaccccccaggagggatggatcctgtccctgtctctctcccctgtcagggacagagatattttctattcccttattgtagatcgtttgaaagatacgtattaccttttttccattattcatcatgaaatcctgtactgcttaatactgtccgatccctctgacctaaaacatcctacgtccttggaagtgccccgccagtattatacccaggactgtgcagatttatcggtaaggaaggcccccgctgggtttagacagaatcagcttccccctatcctgcaccatcttgccattcagtatgatctcacctacacagcagggatcagtggaattaaaacccatccggaacatttttcccaggctgtatttgaagcggatactgcacgaaaaaacgcccgggaaaatagctgccgcttctttactcctgcttcacacaccgtgcgcaaggaccaatttgtaccgctggctgagccacttgcccagcgattggcgtgcaatggcttaaaggaagcagaagcgtatataaaagaaagccttgaaagatccaatttttcttctcctcttacctttgcagaccagtacttttccgaaaaaatgattgtaaaaattgcttatctgcttaagatggacaggcgaagaactggaatgaaatggacaattcaaaaccgcatggcccacatgaagaactttcgcctgcaaaacggaagtcttttagaggaaaacgatgatacctcccttacaaacagctcaatagaaatagagaaatggatccctcacatactggaagaactatgtcaactttctcaggatctcactcttcctctaagaaagagcaacccctatgtggaattggccattcatcagatgaacagccagtatatggaagatttttcacttgaacagctggcctgccatgtggggatcactcaattttatttaagccgcctgcttaagcaagaacgtaatcaaacctttatggagattctcacggatatccgtatccgtcatgctctggaattaatggctgatcctgcccataacgcgcagagcatcagtcagtctgtgggctacaccacaaaatatttttatcaaatttttcgaaatatcatgggcgtttcccaaaaagctttccgagatgccctgtttattcccggggattctgacaacaccttcgaaacaccttcctccggaaaaaagcccagataactccttgactctttcacagaactgccagcctttttctaagaaacaggcagcagcaggataaaactcaaccattctgtatcctggaccgtgctatactgagcctccaggcttccccccatcttctgggcaaattctctggcaatgctcaggcccagtccggtgctgccttgggtgcgggagtcatccggggtatagaaccgctgaaaaatcttctccgccttctcctgggaaaattccttcacatcattggaaaagaccaccttcacaaactctccctgttcaaccagggataccttcaaaatacggatgccataccgctgggcattctgaagaagattagaaacaattctttcacaggcctcaccatcacccatacaccacacagcctgggaggggatgtgtgcctccagttctaaattagcacaagagagcgcctggtagtggtcaaccagatgctccctcaccatttttcctatgtccacacgatgtctgtccagctgttgatccgccccggaaagacaggacagttcataaaattccgtgatcagccgctggagataatctgcccttcgcagcaccacctccatggactctgcgtcctctctgctcagcccatttcggtccataattttcaggtaacctacaatggcagtgagaggggtgcgcagatcatggctcacattttccaccagcttttgaaattccttttcccgccgcacatagttctgtctctcccttcggatcgcccgaagtgcctggttgatagtgtccagaaatttctcggtcaccttgtccggagctgacagcttcaaaatctgattttcttccacagccttcataatctgtgtaagctgctgatctgcctggttaatattttttttcattatctggcagcgcacaaagtaataagctgccatcccacaggctatgatacatatgatgaccgctgccatttctttgcctccttgtttaatgaatttcctttttatttaccagaaccaggccagcggccgtaaaaaccacaattccgatcacacctgccacgagacactttacaagaccttctggcgtctcccaaagtcccacaatgccctgggtatttgccgtgatttcatatttaaaaaagttagcaggcatccattctgcaattccattgaaaaatttaaacttcagtcccaaatagaagcatccgctggggataaaatatacgatggctgcccaccaggctattccggcaatggttttttcacacagctcaaaggttaccacactgaggatgacagccccaaaggtgaagggcagggcagccccaacgccgcctatgagcttttgtaccggacccatataggggccctccagaagcagcctggcagtggcaatatacacgatcaaaactgcggtcatggaagccagaccagccaccagacttaccacacattttcccagaaaaatggagctcctggtaataccataggagattacatttttcgtagtgccatatttgcgctcctctgagtataagaaagctgtcacgcacatgcctgccccaaacatcacacccaggcttcccattaagatactaaaggaaaacgttacggtcccataacggaaattcggaatgaaatgatcagcaacggcattgatgctatttataagtgcaatgaggccgcacaagatgcttgtaagcacatagatctccttgctgtgacatacccggtagcattcactttttatataattcagcatcccatctgtcctcccatcttcaaattcatataataatcctccagggacgccttgtgcttctccagcctggaaacaacaatcttatgttccatggcaagctggctgtaggcctcaatttcccttgtgggttccaaaatatggatcacatgttccggaaggacctggtaggcattgtgctgaagctgtttctccagaagggccgcatattgctccgggtctgatacctgtatctcaataaagctctggcattttttcacaagattttccccagagatctgttccatcagcctgccgttgcttagaaaaccatacacggttgccatctgctccagctcggaaagaatatggctggacaacaggatggtaatgtttttctcccggttcagccgtagcagcaggctccgcatctcaatgatcccgctggggtccaggccgttgatcggctcgtccagaatcagcagctctggctctcccaaaagggcaatggccatacccagacgctgcttcatgcccatggacagatcccggccttttttctttcttttttcgtaaagccccacgatcttcagggtttcctccaccagctttttccccggaatccccttttggatcctgtaatactccaggtttctctccacagtgagctgaggataaaagccaggagtttccaccatggccccggtgcgttttctctgccgctccatttccttgggaaggtgggtcccaaaaagggccagctccccttcatctaaaaaacactggcctgtgaggagcttcatgaaggtggttttccctgccccattgtcccccacaagtccatagatctctcctggcttcaccgtgatatctacctgatccagggctgtgaagctgccatacttttttacaacttttctggcttctacgatgtaatctgtcattgtccatatatcctttcctgtttgtttcttacaggaatgattatagccaagagcctattaataagtcctcaagaaactttaaagaaatcataaagaacagtctctttctttccttctctggcaggctcaggccatcttaaagccgatcccccacacggttttaatatactcctgcccagggtccaggactccgatctttcttcgcagattgctcacatgtacattcaccgtattatcctccccgtagtagccgttgtgccatacccggtcatagatggtctctctggaaaataccttctggggttccattaacagaatctgaagtatgtcatactcatgtctggtaagggaaatttcctcccctttgacggtgaccctgcgggaactctcctccagacataggtttttgtaagtgcagacgttcctatcctggggctggcacacactgccgcttctgcgaagggctgccagcacccgcaccaatacctcctggggttcaaagggcttgatgatataatcatctgcacctatggtgagagactccaccttgctctccagggacgcctttgcagacaagacaaggatgggcaaggacagcttttgttcctcccggatgattttgatcagctcttctccgctgattccaggaagcatcagatccagcaggatgagatccggctgctttaaggacaacacaagctttgcctccgtgccagaataagcacagctcacctgatacccagcctgttttaagattctctccaaaagacgattaatatcctgatcatcttccacgaccaatatgtgtttttcatccatagcttctttctcttttccagtagttaatcttggaatattatacacgaaagccggttagaatggtagtatttcagcagatcggataggggagattttaccctccccttccacaccacgtagcgtaccgctcggtactacgcggttcaatagtttacacgaactttcagatagtgggctgacatggatggatatccgagtctgtccactatgattgtctttgttagcgcagagtttagcattccggccgctctccacactcccttccggcagtttgccatttcatgtactttccactttggcagatgtagcgcccggagcattttgtatctcgtgcgcaccttcttccattgtttccagtatattgcccggattctatggcgcagccattcgtccgtctgttccatcaggtttttcatgtccgcataccggtagtagtttatccatccacttgcgtagcttcggagtttttcttctcttaccttattgctccatttgttccctctggttgtcagttccctcagcttattccgcattttctccaccgatttcgggtgcacacgcatccggcatttccccttatatcggtagaatgcgtagccaaggtattttattttgcttacatggctcactgtcgttttctggagattgacttttagatatagtttccccgtgataaatggcataatgttctccaacgtccgttctgcgcttttcctacttttacatagtatcagacaatcatcggcataccgcacgaacttgtgcccccttcgttccagttccttatccagctcgttcagcatcacattcccacacaacggactcagcggcccgccctgcggcacgccctctggtgtcgtgtggaatccgtcgtcctccatgaccccggcattcaggtacttgtgtatcagtgagattaccctcccatctttcaccgtccttgacagcacctctatcaatttgctgtggttcacggtgtcaaagtaggattgtaaatccatgctgactgcatatacatatccctcattgatgtattccctgcacctcgccaatgcatcatgtgcgcttctgccggagcggaaaccgaagctgttatctgaaaactgttcctcataaatgggggttagttcctgtgcgactgcctgttggattaccctgtccactactgtgggcactcctaatttcctgaattttcctttctcctccttaggtatttctacccttcggactgggttcggtttatactttcctcccctcacctgttccactatctcggcctggtgctctctcaggtagggcagaagttcatccacctgcatcccgtcaataccaccggctcccttattctctttgaccctcttataggcggcgtttaggttgtcgcttctaagaatcgtatccaacaggttgtccgtcctaaaatccgtgttggtgccagggtttccggtaatcctttcatgggcgtacactcctgcttgctctttctgttccgcagataccttccgcaggtagtcctctatacgaagttgtctgtacttgtttccatgtccggtttccatttgaaaatgacacctcctattgttcagcccttcgtccagtgtttgcaaccactggcttgtcgggtaagggaattaccttgcagtcattccctccccaaagaacggaacgtgcagctttcaccgcattccgctcacgcatctataacgcataataatttatctgcgcagctcgattggaacatatcgctttctttctattaagacggtgtttctttgcccggttttcaaagtactcctggtcgaggaatggatttttatcaagtgccatttgcccctttcggactatcggcatatccatcatcaggaataggatgttcttatctgtcataaacgtccactttcttcctttatgtgttttccagtatttatcaactatccaatgcttactcttgtttggatgtctacgtttcgcccatctccataacatttcccatatacggtggtctaccgtactaaaggatttcttagcacaggtggagtggtgataattcgcccatccccgggtaatctcatttaacttgcggattaggttctcttgctttacggtttggctgttcttaatcagttcactgacttttcgtgtgattttgcacatggatttgtgggacggcttgataattagcttccctttgaactttcgaaagttccatcccagaaaatcaaaaccattatctatatgggtaattaccgttttctcctctgataaggctagtcctcttggctttagaaagtcttctatcatttgtttgatttcatccagtgtttccctatcggatgccgtgactataaaatcatcagcaaaccttaccacatggactttatggttattgtatttaacactgaaggttttcttaaccctgctccgccaatatacatccagaatcataggttccagtccatccagcaccaaattcgcataggttggggagatgacgccgccttgaggggaaccttcatccgtcggaaacattcgtcctctttcaatgtaaccgcattttgtaaactcctttaggatccttttatctgttgggatgttgtctgccatccattgatgactgattttatcaaaacagcttttaatgtctccttccagtatccactgcggtgagtctttcctgctgagtacactaaatgcgtattctcttgcatcttccgggcttctatatctcctgaagccgaacgatattctgtctgcggttgtttctgctactggttccagcgcaagaagctgcaatgcctgcatggctctgtccctcatagtgggtattcccaacggtcttttctctttcttcccaaacttctctatgtatacccgtcgtaatggtcgggcatgataagttcgtgtatcaagatttcgtactgcattaactctgtctttatcagatttccataattctccatctataccaggagtattctttcctttattggtaactacccgttttaccgccagtgctttcgcgtaaaatgagttcgttaataagtgctggagccttttaaccagtctccacttttgttccaatgttgcctttacaatccgaatctgtagtctgttaacttgctcttctgcttttccccagtcaatctggttccacttaagtttcatgtctgtattgtcctcacgattgtgtaattgaacctgatacattcacagtttccaattccttcatgtaattgatacgcgttggaagtctgcctcctttcggatagggcaaatcttgaacccttattctctgcattacacagagacgttcgctttttccaatatcctctgccttctgcgcattgtacctctcttgcgattggcctacccattgggagcgcataaggtttaccttgttccaccatctagataactatgatgtgtttaggttctgtctataggccgggagttctctgtccatttcggcacggcatcatagtaattaccatgtccccgactccgcactattttagtcaaggtgtatcatccacttttcacctttcatcagactgacgacccttgcgacagttcacatatgttaaccatgcacatcttttccttgcaatagggcagatgtggattctgcctttctcacgttgtcccgttgctccgcaccgttcatcacttactaggcactttacggtaggaatactacgaaatggaagtagtagtgttttgacacacaatctaaatggcgacttacaagtcgcacactatggcttctgctgacttctcacggcaagctttactccgtggtaacgaatgttttatcgtttctgccacgtccgtgagacctccccgggtactcacacgctctttcccacttatacctgccccgtctactgctggcgttccgtgcagttattggactttggtttgtatggcaacctcatccacgcttcacagcctatccggacaacttttacaggccagtgttttgcctccggcttccttcagaccccacctcacagtgacgcccttgcctttggctgcatccttcccactgccgggcggatcagggactttcaccccttagaacgtgcgtccgccgggcacaccacaacaaaaacccacaaacatcaagtctgtgggttttctgtatactgcagatatgcaattttctgtcttcttgtgaaccaaaattatcgttagtgaaactccaaacaccgaaaaaacgccatttttaagctgtttgtaagttacgtattcgttacctatatcttctcatacgtcctcatattgttaagctcaaacattacgctatttgttccattgcaaacggcagttcatgtaaagtatcggggtcaatatccagacaggtagtagtatcgcgattcttatttatatcccacgcaagggtatcatttaatacggtgcaggtatccataaaaacatcaatatctttcaatggatagaacgctggcttgtcaatcatttgtgacatatcataacatacgattttaccatcttcaaaatacacatatacagagtagtctttcattggtattacttgtacaacctttggaaacatataaccacctcctgctatactaaaggattgattctattcattggttttccgtctttcgacaattcccaattctgcatcaattcatcctgatgtaacacacaccatgctaaaattaatttcaattgtcttgatggtaacgcccctcttattactcttgctgcatctatttcaactattgctttatttccgttgtactcagcatgaaaatgtggtggattatgatcatcataatacattgtcactctgattccataaaaaagtgatatttccggcattaaatcttcctcctcatttcattcttaaacatatatacttgatagtatcagtatatcatagttatcatgtcaaaaaaacccacaaacataatattttccacccgtgtactgtctcattgacagcttttgttttccgatacttgctattccttttgagaagacctcaaaacaccacttagcaaatatatttcaggcaatcccttactgatgcttgttagtctaccactgtataagtctgcccgcatttctttaattaaattggtaaaggtttctgtgtatttggtttcatactcagtaatatcaccatattttagatgccttatcattaaatccgatagctcatataaatagtgctaatggaggaacatgcactcaattcttttgctgtaattgatcgctgctcttttaacaatttaatgactttctcatcatcgccaacttcattgctaatttcattgccagtggtggtgatttttttatccacgttctccgcataagggaaaactgccttgataaaatgctcggaaatctggaaaatgtctttatcgtaggctttactctgccctgctgttattaacggttatgccaattctcgtatctgctccaccagcggctgactgcgtagctgctttatggttacaaacgaaaaagcaatctggacaatgagcatcatggcgaaaaatcccgccatttcccacactggaaaatgatagctgacctccccaaaaacactcattgcgctgaataccttgcacacaagaatgcccaaaagtgttccaaatgaaatggaaagcacaaacatgctcagtgtataaagccagccttcggtcagcaacatctttgaaatttgacggctgctcatccccacagcctgcaatatccccaattctcgctttcgtgccagtacgtttgtgataagcgtatttagcagattcagcgcaccaaaaacaccaataaacaggataaaaatatagactggggtgcgataattctctaataagtcctgatagttttctgcccatgcgtttaatgtggtaacatatacccgcgcatttgccgggatcatttttctgacttcctcgcgcacctgctcccaatcgctgtcttctgtatcaagaatcacctgataattcaggttttcatccggcataagggcagacagcgtttctaacggtataaatacaagctcatatccgccatatggaataccttcatctacaattcccataacagtaacttctaaacgctctcccgaaccagcttgaattgttatcttgtcgccaatggacacttcccatccaaaaagatccgcccacttatctgtttgctttatgacaacaccgttattgtgtactagttcttgcaaatcagccgtccccgcaatcaaatatttttctaaaagagattgtctttctgctgaataggcatctgttaggaaaagctcttcatcccctgatggaatggtgacgttcaagactgttccgcgatatacccgcagatcctttacgccgtcaatcgctgcaagctgctcaatgagatccggtgataacggattatctctttgaagttcaacaaattgttcactgttatgggattgtgaaccatagtcccccagttcaatacgaactttgccataagggaacacgctgcgggctacatttaccggatcaatagagttaaagtaagctgaacttgccattagcaaaatgccgcatatacccaacgaggcaattgtcaatgctgttttctttttattgcgggaaaaattaataagagccaatctattgctggataaagaccgatttaatctctttgtacttttggtaattacttcttcattgccagcggtatatcggacggcctcaatgggcgttactttagatgcaagtttcgcaggccgccgtacggtaaacataacacacatatacatgaaaaccgcaacaaaggctcctacgatcagtgcggtaaatatattccatccatctggaacaagtacatatccggccactgctcccactacaactcctatggggatagctgtaacggctaatttgcgtccttcttttattacgatgcaccgtatttgacggccagtagttccaatcgttcttagctttccgtactcatttgtttttctgatgatggaaacaaagaacaggctgtatattaccagcgcacacgctaaagttacaatcaaggtaacaaatgtgatgatcgtcatatactcaaaacttctctgtcgaataagggaaaaatagtaactagcaaacccaacagctcttaaatcaatttcccactctcccgccaaattgcgtatatagttctttagatcttcttccgataggtcatccgttcctttcgcatggatatatgcgctatgcaaaggactttcagcgtttcttttcacgaaagaaggggtcacatagattgcatagtttgattctgtaacaggcaatataccgcataccgtgtaactctgctggtcacctgtcaagctcaactggatcgtatcaccaattccgctggatagaccttcccgatctaaaaatgcttgtgttacagctacctcatcctctgtctccggcaatctgccgtttatggctgggtattttgccaactgcataagattttcgtccacagagcgcacagtaatcttgtactctccatagtcaatcatccccattaaatagctgaaccccgctatcactcggtcatcattctgaattttgcaggctgtttcatcgtcaagatcgctgatggtcgcctgatacattccttccgcactattgcgggaagctctttgtccgttcagaaagtatagtattgttgccatgatcaggcaggcagcgaaagcaatggtaattatgataagcatatttctggtcttgtctgccttcaggtttctttttgccagcctttttaccatggcgctggtgtcattttcaaaaggccatgtcatcgtgtcacctcctatcctgcgatcttgccgtcctcaatcgtttgtaaaacactcatattcaaatgctcctttcaaggcttctcacctgttgataggaccattgtaaaactcaaatgtaacagaaatgtccgaggcatccaaaaatataataaaaatcggggctaaatgttacaaagctgggacaatcagaaaattacggcggtgagataaaatcggacctccgccatgttctatctggtaggaagcatcatggaaaaggaagaaccttgtcccacatccgaaactactttgatatagccgccctgccgcgtcacgatctggcgggccagatacaggccaatccccacaccctgctgttcgtgtacatcttcctcccggtagaagcgccgaaaaatagcagcctgatttccttcggaaattcccttgcccgtatctgacactttgatctccacatacatttcccattgcgccaccgtcacagaaatttttccacctgccggggtgtactttaccgcattgtccagcagattaaaaagtgcctccgctgtccatttgctgtcgtgggaaagagttagatcttctggacaatccacggacacagcgatttcttttttctcggctgcatacacaattccactcatggcctgtgccacggtatcaaataggcgtcccgttttcttatccaactgaatcactcctgtttccagccgggaggttttcacaagcgcctgaaagagaaagtccagtttatccgtctgggcgcggattccccaaataaagtcggtacgctctacttcggttaggggcttttcaagcagcgtgtccgttgccattttcagattgcttaccggggttttcacctgatgagaaatatccgataccagcatttgaagctcctgtcgttctttatccaccctgcggcggttctcctgcatgatctgatagagcctttccagccggtggccgatacgggcaagctgtgtttcgctgtccgctggacgctttggtgcttcgttcccggcaatcatgtggtcgagggtctggcataaatcggtagtaaacaggacaagccgctttccaaaggcctgcgtcagaacaaggagccagacaagggcgcacagcagcagtactccacctgtcagcagtaccgccgtctgctttgtgatagagaataccgttatagaaattgccgccatagatatggacagccctgccgttacccagccaaacagccactttacagaaaggttattgagcttcattttgcttcgcctcctgtccattgataacccatgccataaacggtcttaatataaggtgtacctccgtccgcttcgatcttgctgcggatccggctgatacacgtggtcaaggtatgctcgtccacaaacttctcgtttacatcccacagcttttctaaaagctgtccacgggtcagcacttgccggggatttttacggaacaggtttaacatcttgtattccattggagataaggccaggggcttgccgtttagagacgccgtctgctccgaaaagtccaaaaacaaccggccgtcatcataaatatcctttgccggtttatggtgttccaacatggaaaacatggccttgatttttcgttgcaaggctccgatcacaaagggctttgtgatataatccaccgcaccgacttcatagccccgtatctgatcgctctcctgatcgttagcagtcaggaagattacaatcgtgtccggttgttccggcttaatgagcttgcataggtcatacccgttgccgtcgggcaggttaatgtccagcagcaccaaatcaaattcccgctggtgcaaagcttgtgcggcggttctgacatttaaggcagatgtcacgccgtaaccgtctgcggtcaggttataagctaacatcttatttagaaagctgtcgtcctccacaattaaaatctgcttcatatcctcacttccttgctttttgcaaatagtataacaggaaaatgtccgccaaatgttacagcggacgattcttattttcttttttgcggccatctgccagcttttctcggcagccccatagattcaaaattcatttcaaggatctggtcgtctttcacaccgcaatctctcaaatgatctgccatcaatttcatcaggctggatttcccacagagcctatcattaacacaaaaaactgggtcaaatccggagaaaaaaggacatacgaaatcatctctttagataaagaaaaaccccgaaagccgtataacttcggggtttttgaacgttttcgattgtaattgtccagccgattaacgcttgctgaactgaggtgcgcgacgggctgctttgagaccgtatttcttacgttctttcatacgtgggtcacgtgttaagaagcctgcagatttgagaactggtctgtagtcagcatctgcctgcagaagggctctggacacaccgtggcggatagctccagcctgtccggtaaatccaccgccgtgaacgtttactaatacatcgaattttccgtctgtctctgtggcaaccaggggctgacgaacaactaccttcaatgtctctaatccaaaataatcgtcaatgtctcttttattgatcgtgatcttaccggttccaggtaccaggtaaactcttgcgattgatttttttcttcttcctgttccgtagaattttgcgctagccaatgttttctacctcctcattaaaatgttaaagcttctggtttctgagcagcatgtttgtgatcaggaccagcataaacgaaaagtttcttgtacatgcttcttccaagaggtcctttgggaagcattcctttaactgccagctcgataactctctccggcttctttgctaacatttccctcaatgtagtctctttcataccgcctacatattcggagtgattgtagtagattttctgatccagcttcttgccggttactttgatcttgtccgcattgacaatgatcacataatcaccggtatctacgtgtggtgtgaactgtggtttattttttcctcttaaaacgctggctacgttggatgccagacggcctaaagtacactcagcagcgtcaactacataccattttctttcgattttatctggattagccatataagtctgcatggttttacctcctgtaattgttcgtatcaattattagtttattgcacgttttcttccgcgcataatgatttcattaacgcgactcatgcagcggatagaatgtccggactatccataaataaaatcgttgcctgggcttttggcgctgatttcttcgcactacgtcacattgagtaattatattataccaactttttcttgtcaaccactttttcctgattttctcagatttttacggattttgtcaatgggataagcttcctctgccccacagcctgatccggtcaaaaaaactgaatgcccatcagcgtaagacccggacgtttgacactcaaaatcccccaaagccttgataggcttatatttttgtgtcaaataaatatttttatattgcgtactatcgtactttgtggtatactataaccatatggatactatatcttgcggaggtgcctcaaatgcgtcttaagtacaaccaaacacaaaaaggtaaatgctactatatcatccggtcggtctacaaaaatggaaaaaacaccagtgaaacctacgagaaacttggctatcctgaagaaatctctgaaaagtatcactgcgcggatccgtttcagtggatgcaggagcatctggctgagctcaacgagaaggatcaggcaagaaaaaatcaaaagatacttgttccgtactccccctatacacgcatcccgaaaaatgagagacagtctttcaacatcggctacctcttcctgcaaaaagtttactatgagctctgcatcgatctgatagctaggcacataaccaaacggcatcatttccagtatgacatgaacgctatcctttcccgcctgatctacggacgcattcttttccctggctctaagctctctacctgtcgtctttccaaagggttactggagcccccggatttcgaataccaccaggtcgcaagagcactgtccgtgatcgcttcggagtttgactccatacaagcggagctgtataaattcagctcttgcgttgtccctcggaaaaccggtgttctctactatgactgcacgaatttctattttgaaacggaagaagaagacgccatttccaatgcgcaagccgatgccctggaaacggcagcacgcaaatacgggcacagcaagcagcaccagccttccccactcgtccaaatgggcctgttcatggattattccggcatcccgcttgccatctgtatcgggaggggaaaccgcaacgagcagaccacccttataccgttggaagagaaaatcctgcaggacttcgaactgtccagattcgttgtctgcacagacgccggccttgccagcgaggcaaaccggaagttcaacaacttcggcgagcgctcctttgtcaccacagtctccgtaaagacgatgggaaaagaactgcaggaatggtgcctggcacccgatggctggcagatggaagggagcagcaagctttataatatcgagcatttagaagataacgaaaaagatcaagaagaaaactacgacaagattttttataaactgaaatacatcgaagactatgacgaagaaagggatattgaattcaaccaaacactgatcgtcactttttccttaaaataccgcaactttctccgttacaaacgggatgggcagatccagcgcgcgatagcagccatcgaagggaaccattcttcccttgaaaagaaaaaccagcatgatttccgccgctttgtgaaacaggaagccaaaaacagcagaggcaaaaaggtgaatgtgagttattccctgaatgaagatgcgatcgctgaggagaaaaaatatgacggcttttatgctgtggagacaaaccttgatgatgatgtacccgaaattttgaagattaacagagggcgctgggagatcgaggaatctttccggatcatgaaagacgagttcctgtccagacccgcatacctaagccgggcagacaggatcaaagctcacttcatgacctgtttcatgtcacttctggtttaccgtgtgctggaaaagaaacttggggacaaatatacctgtgaccagattgtgtccactctgcgggaaatgcgcgtgacaaaagcaaaggatgccgggtacgttcctgcgtatactgcgactgatctgacggatgcacttcacgagtatgccggtttcataaccgattatgagattatccgtacaaaggcgatgcaggggattatccgtagatcaaaaatgaggtagctggaaaaagttagtacgcttttcataaaaatcaacaaatcccagaaaacatcgatttttcaatgttttctgggatttttaacgtaacaaagtgtcaaacgtgggatattataccaactttttcttgtcaaccactttttcctgattttctcagatttttacggattttgtcaatgggataagcttcctctgccccacagcctgatccggtcaaaaaaactgaatgcccatcagcgtaagaccctgggccggagccgtaggacctgctgcctcccggtcacaggcttctaaaatatccttcatccgttctggaggatactgcccgtttccaatctcaataagggtgccggaaagaattctcaccatattatagagaaagccttcccctgtcacccggatggtgaccatatccccctccctaaatacctccatggcagtgatggtgcgaaccgtagattttacctgggccttggccccgcagaagctggcaaaatcatgtcttccgatcacataggaggtggcggcccgcatcttctccacgtccagcttatagtgataaaagtaggaatacagccgctctgtgggtacaggaaaccgcctgtttaaaatccggtattcgtaggtcttctcactgtcacagtatctgggatgaaaatccggctccacttcttcagacagctgtatacggatatcctccggaagccgctggttcaaagcataggagatcttctctcccggtattctggtgttggtatcaaaaacagccacattccccagggcatggacccctgcatccgtcctgctggcccctatggtctcgatctcctctcccaaaagctctgacagcgccttgttgagcaccccttgtatggtgatcccgttgggctgtgtctgccagccacagtaattggtgccgtcataggccaccactaatccaattcgcttcattgttcgttcctctcaaagagaaagatgccggaagcggtgacacttcaggcatctttcttatatgattcctgttttctctctatattccaattacacggaaggcaatggcgatccccagatatacggcaagcaccccataggcagctatatcccgcttcttataaacaaggggcttcatctgcgtccttccctctcctccatgataacaccgggattccatggccatagccaggtcatttgcccggcggaaggctgagataaatagaggcaccagaaggggcaccatattttttgccttctggataatattcccgctctcaaagtccgctcccctggcgatctgggccttcatgatcttatcggtttcttccattaatatagggataaaccgcagggcaatggacatcatcatagcgatctcatgaaccggcacccggattttcttcaaaggtcccaaaagccgttccaaaccatctgtaagctgattgggggttgtagtcagggtcatcacagatgaaccaatgaccagataagtaagacggatagccatctttcctgcaaggaacagaccctctctggtcaccttgagaaatccccacttccaaagtacctcccctggagttaggatcacattaaaaaccatggtgatcagcaaaataaaaaaaatcgccttcaggcccttgaacataaactttacaggcacctttgacaaaatgatcacacctgccagaaatgcagttgccacagcatacccccagaaggtgtgaaacaaaaatacggagacaataaaagccagcgtccctgccagcttcgtccggggatccattttatggagaacggaatccgccggataatactgtccaatggtaatatctcgcaacatctgtcctgtcctcccgctaactcatctttagggcctgtaaaatgctgtccctggcctcttccactgtggtggccatagtgtccacctccagccctttatccttcaaagcatgcataatataggtgatctgcggggcagccaggcccatggtctccagctccttataatgggcgaagacctccttgggttccccatcaaaggccaccttccctgcgttcatcacaagaatgcgctccacatatttggcaatgtcctccatactatgggataccaggacaatggagattcctctcaccttgtgaagcagagcgatctggtccaggatctcatcccgccctctggggtccagccctgccgtaggctcatccaatataaggatcttgggatccatagccagcacgccggcaatggccacccgcttcttctggccgccagacaattcaaagggggatttactccaaagctcctgcgctacccccacatgggtaagggcttcctttgcccgattggctgcatcctccggggaaagtccctggtttttcggcccgaagcttacgtctgtaagcacatctacctcaaagagctggtgctccggatactggaataccagccccacctcgctgcgcagctgacgaagcttgtagccctctgcccagatattttctccattgtaaagaatctctcctgaggtaggctttaataatccgttaaaatgctggatcaatgtggattttccacttcctgtatgtccgatcattccgataaactggccgtccgggatacacaggctcacatcatccagggcatgaatttcataagccgtaccctggccgtatgtgtacatcacatgttttaactctattgacataaggcattcaccaactcttctgtagtaaggattccatctggaaggcacacccctgcctgcttcagctcatgggccaggagcgtcacctgaggcacgtccagccggtaatgcttcagcttttccacctgggagaaaatctcccggggtgttccctccatgaccacatttccactgtccatgacaaaaacccggtctgcatcaatgacctcctccatgtaatgggtgatcaggatcacggtgacaccttttttctggttcagctccttcacagcccccaggacttctttccttccattgggatccagcatggcggtgggctcgtccagcacgatgcatttgggctccatggccaccactcccgcaatagccactctctgcttctggcctccggacagcttgttaggtgaatgatgacgatattttgtcatccccacagcttttaagctgtctcccactctcttccagatctcttctgtggggatccccatgttttctggtccgaatcccacatcctcttccaccaccgtaccaatgatctgattatccggattctggaaaaccatgccggctctctggcgtattttccacagctcgggctcctgggccgtgtccattccatccacccagagggttccctgggtgggaagcaaaagcgcgttcatatgcttggctaaagtggattttccagagccattatggcctaaaattgcaataaactggccttcctcaatatccaggtcaacgccgtccactgcccggaaggtatcctccacatttccgttgtcatcatacttgagatattcaaatgcaagcttggtcgctttaataattcccatttgttcctccgcctacctgtctgtgctttcctcctggccaatgcccaaaagttcatccatatattcccagatttcctctcttccctgcttgctttgagcagaaaaggggaaaatcctggtgcccttcaccacatccagcccttccttgatcagcttcagctgcttttggatctgacttctttttattttatccagctttgtggcaataatgatgggctcatatccattgtgcaagatccagtcatacatcatcttgtcgttgctgcccggctcatggcggatatccaccagaaggaaaactgccttgagcatccgggagccatggagatagcgctcaatgagctttccccatttctccttctctgactgggctgccttggcataaccgtatcccggcagatccaccagatacatggcattgtttatattgtaaaaatttatggtctgggtctttcccggctgtgcacttgtcctagccagagatttcctgttcatcaaggcgttgatgagggaggatttccccacattggactttccggcaaaagcgatctccggcatgtcattgtccggaagcacacttgtcacaccacacacaatatccagggatacttctttgattatcatgggctgcccctttctaacttcctaattattctggagtgcctgggagagaacctgactcatgctgtccacaaaggcaatattcaatccctccgtgatctcagcagacatttccgagatatcatttttattttccgcaggcactaaaacagtcctgatcttggcgtatttggcagccagaagcttttccttaagaccgccgatgggaaggacacgccccctaagggtaatctcccctgtcatagctacctctgcctttaccgggcgtccggtgatcgcagataacatggcagttgccatggtgattcccgcggagggcccgtccttgggcactgctccctcagggatatgtacatgaatgtcatgttccctgaagaaatccggcgggatctcatattcttcagccacggaacggatatagctgatcccggcctgggcagattccttcatcacatctcccagctggccggtgaggagcagttctccctttcctggcattacattcacttcgatctgaagggtatctccgcccacgctggtccatgccagcccccgggcaatacctacctcgtcctttttattagccataagataggtgtaacgctcctgtccaagataatgggaaagatttcccggggtgacgatcaccttctctttgccctcttccagaatctctctggcagtcttacggcagatgtggccgatcttgcgctccagagaacggaccccggcctcctttgtataaccgttaatgatctttctcagagccgccgggcggatggccagctggcccttctccaggccgttggcttccatctgcttggggatcaggtgaagctttgcgatgtgttccttctcattttccgtatagccagaaacctccagaacttccattctgtccagaagaggtttggggatcccgcccatgtcattggcagtggcaatgaagagaacctcggataaatcctgcggaatctccacataatgatcactgaaatggctgttctgctctggatccagaacctccagaagggcggatgctgtatctcccttatagtctgaactggttttatcgatttcatccaaaagcattaaaggattattcacccctgcctgcaaaacagcagcggtgatccgtccaggcatggctcccacgtaagtacgccggtgtccccggatctctgcttcgtcccggacaccacccagacagattctcacatatttcttatctaaagctctggcaacggattttgcgatcgaagtctttcctgttccgggaggtcccacaagacacagaatgggactttttcccttttgagtcagccgccgtactgccagaaactccataattctctctttgatctccttaaggccataatggtcctcctccaggatctcaaaagctctttttaaatcctgggaatcctgggagtgcttctcccagggaagattcagaagcgtttcaatataattgcggatcaccggactttctgcagcagcgctgttcattgtacggaaccgctcaatctctttgagaattttatcctttacttccttggatgcctgaaggtcctgtgcttttttcttgaactcctccgcctcaccggcagtattgtcctcccccagctcttcccggataaccttcagctgctcccgtaagatatattccctttggtttttgtccacccgctccttgacctttttctgaagatctctggtaatgtgcatgacctcgatctcattgttcaggatcacacccagggtctcataccgttcttccaaagtgactgcctccagcagcttctgcttctccacatagtttaggggaaggtggacacagatttggtcaatgagggtctccacatcttccagattcaaaatctgggacaccagctctttgctgatctttccattttccacacagtaggcatggaacagctccttaatggtacggcgcatggcctcctggacatagatcccgggctgggcttcctcctctttggaaaaaccggccacctcacactccagatatggctcctcctgctccaggcccaggatttctgcccgctccgttccttccacaagcacccgcagcatatcatggggaagctttaccacctgtttaatataggcaatggttccgatcctatacaggctggtaaaacttggtttctccacatccgcctgtctctgggtcaccagaaagatcttctggtcctccagcatggccgcctccaccgctttcacggaacgctccctgctcacatcaaaatgcacgatcatacctggaagtatcgtagttcctctcagggccacagttggaagtattcctattaaatttttcattcgtcctgcctccttgcttcctgtcaggcggtttcagacttgcccttgcgcttattgttccgggcgccccttctgcctggcacattggcaggaagttctcccctgacaatctccggctctccggttccttccaccgcttccttggttatcacacatttcctgatggtgtcatcggagggaactttatacatcaggtccatgagagaattttccacaatggaacgaagtcctctggccccggtctttctttccatagattttttggcaatggtctccagggcttcctgattgaaatccaattccactccatccatctcaaacaatttatgaaactgcttggtcagcgcatttttcggttcacttaaaatcctcaccaaagcctgctcatccagggcatccagggtgacgatcacaggcacacggccgataaattccgggatcaatccaaactttataaagtcctcaggcataacctctttgagaacctctcccacattgtgctttcccttctcctgtatatctgccccaaagccgatggccttcgtatcctttctggtctcgataattttctcaagaccttcaaaggcgccgccgcagatgaagagaatgttggtggtatcgatctgaataaattcctgatggggatgctttcttcctccctggggaggaacactggcaacggttccctccagaatcttcaacagagcctgctgcacaccctcaccggatacatctctggtgatggaggcgttttcagactttctggtgatcttgtcaatctcatcaatatatataattccatactgggctctctcaatatcatagtccgcagcctggatgatcttcaaaagaatgttttccacatcctcacccacataacctgcttccgtgagggttgtggcatctgcaatggcaaagggcacattgagcatccttgccaaagtctgtgccagcagagttttaccggaaccagttggtcccagcatcagaatattgctcttctggagctccacatccagattcctggctgccagaactctcttatagtgattatagacggcaacagacagagccttcttggcatcgtcctggccgatcacatagtcgtccaatatagcatgaatctcctcgggcttcagtaaattaatgtccgagtcatccatctcatcatacatatggaactcttcttccataatctctgcacagatcccaatacactcatcacagatatagaccccgtcaggacctgcgatcaattttctcacctggtcttcggttttgtgacagaaagaacatcgtattcttccctcttttattttatctgccattgacatatttcctttctctattaattgagataagactcctgctgcattacaggagtcttatcaggagttatctgtgttcgatcacgctgtcaatcagaccgtattccttggcctcctgtgcggacatataattatccctgtcagtgtccttttcaacaacttccagaggctgtcctgtattggcagcgagaatctcatttaaggttctctttgtcttcgcaatgtggtccgccacgatctggatttccgtggcctgtccctgagccccgccagagggctgatggatcatgatggtagagtttggcagagccatcctcttgcccttggcaccgccggccagaagaaatgcgcccatactggcagccattcccagacagatggtggaaacatcacatttaatatactgcatagtgtcataaatagccatacctgcggttactgaaccgcccgggctgttaatatacagctgaatatccttaccaggatcctcggactccaggaacagaagctgggccacaaccacactggcactcacatcattgacttcttctcccaggaatatgatcctgtccttcagcagtctggaataaatatcgtaacttctttcccctctgcttgtctgttcaagcacataaggtactaaactcatataatatgcctcctatccaggcacagaagtcttaagcctgctcagactccttgtctgcttctacttcctttgcctgctcagctacaaaggtaacggccttctgaacagccatatccttcttcatctgcgccaattccgcttcacccataagacctttgactttgtcaatctccatcttatacatgtcagccatcttcttgatctcttcttctacctcttcctcagtgggctgaatattttccacctcagcgatcttctccagaaccagtctggtctgaatgcgctttaaggcctgaggtttcatatcttccatcatcttctcgccggtaaggccggtgaatttaaagtactgttccatagacagtccctgagcctgcattcttcttgcaaaatcctcagccatctgacggctctgggtctggatcattggctctggaatctccatggaagcgttctcgatgatcttgtcaacagccgcatcctcttttgcacggacagcgtctgcttccttcttctcttccagtttcttcttaatgtctgctttatattcctctaaggtatcaaattcagatacatcctttgcaaaatcatcatccagctccggaagctcttttgcttctacctttttcacttcgcatttgaatactgccggttttcctgccagctctttggactgatattcttccgggaaggttacattcacttccacattttctccggcctttgctcccacaagctgatcctcaaagcctgggataaaggtgttggagcccagagtcagtggataattggtgctctttccgccatcaaaaggaatttcgtctacaaagccttcaaagtcaatggtaacaatgtctccgttctgggcgccccggtcttcaacagtgatggttctggagttgttctcctgctctttcttaagctcaccgtctacttcctcgtctgttacaacgatctcagttttcggaacctcaactcctttatattcacccagggtcacttccggtttcactgccacagcagcggtgaaaatgaaaggtttcccggcctcgatctgaaccacgtcaatttccggctgagacacgatctccaggtcacagtcagccattgccttattgtactcctgtggaatcagggcatttgctgcatcttccaggaaaattccctttccgtacatctgctcgatcatttttctgggagcttttcctttacggaagccagggatggaaattctgttcttatttttctggtatgcgccctggatggctttctctaattcttcggcagcaacttcgattgtaagttttgccatgtttttttccattttttccacttgtaaactcatgataaataattcctccttgaaatatagttagatatcgcggaaaattctcttcaaatttcagttatctcacgcccgcaatgagcttcattgtaaaatgggaagttgcatacctctccatattcacagtcattaaggtagtataccatatgtttttaaaaatggaaagtattttttcaacaatcatatacgatagattgggctatctgggcggatttctcctccccctccagcttggagatcagggcaagggaaaattcaatggctgtcccaagacctctgctggtggtcagatttttgtccaccaccactctctcctgggtggtgagggccccggtgagtttccccatctctgtgggataactggtagctcttctgccctccaacagccccagtccacctaaaattctgggagcggcgcagatggcagccacttccctgccttccctggcgaagcggctcaccagctcacaaagtggtgtacaattttccagattagccgtccccgggccgccgccgggaagtaccagcatatccgcagtctcaaaatctgcctcctcccacaaaaggtctgcctgcaccacaatgttgtgggagccgcagatttccttatccgccttgatggatacggtctttatgtcgatctgcgcccgccgcagcaggtccacaacggtgaggccctctatttcttcaaatccgtccgctaaaaacaaatacacttttttcataataccaaccgctccttcctattctgtcagggcaattataacattctgcttttctatttacaatggaattgatatactgataaggaagaattttaaaaaatagactgtggacagcgcttttgaaaaaaaggccccagaaaggacaggaattgattatggaacatatggagatcgaaagaaaatttcttgtgaaggagcttccttctaatttagaagaataccccaggctggagattgaacagggttacctgtgcacagaacctgtggttcgtatccgccgtcaaaaccaggactgctttctcacctataaatcaaaggggcttatggcccgggaagaatacaatctgcccctctccttaccggcctatctccatctcagggaaaaaatcgacgggatccttctatccaagacccgttacctgatcccccacaaacagggactaaagatcgagctggatatcttccacggaaaataccagggcctgcttctggctgaagtggagtttcccagtgaagaggctgcatcagcctaccagccccccagttggtttgaccgggaagttacctattgtaaggattatcacaacagcaccttaagcaaaggcaaggagtcttaaaaggctccttgccccagggctttcccttattttccttactgtatacccgccgggtaaaacctgtcaatgatgctttttctctaaccatttggcatagagaagaggtatttttatgatcacagacacaattttcttccctatgcggcttttgccgcttctgttatatttcatacaccattccagcaaacgcagcatattttctcctttttaacaaacaataatattttctcacatcgtttacagatttttccatttatatgcattcatttcgttgctctatagattctaccaattccctcttgttataatagagattatggctaaaaatatccgatgtccgggacttcacgttcatcttgccggtattcaaaaatccacccaaacaaaggagcaggatatgtatccattaatatttgcgcataaccttcggttttatcgcctttcccggggcttcactcaaatggaaatgagcagggaacttaacattcagcgccaaacctactgcaattatgaaaatggacaccgtgagccttctcttcaaattatggcagatatttcccgtatcctgaatgttgatctgcatgtattgataacagggaaaccagggccgagaattatgacagaagaggattataaaatctatacaatccactaaccgaataatcagaaatcttatatggatcgctgcagccaagcaatgaaagctttagtactttctgttcttagttctcattgtaacactgcagcctttcttttgcaatctatttctttgcctatattcttccattatttgccaaatacgtttttttctccatgcctttagcgccttccgctcaaagagatcatccccgcaggtcattaatccagatcataccaatcaaaaaggacagctgctgcaaaagctgtcctttttctgtctctaaaattctctacatctgtctgcccttttccacacaggcacgcatagcttcaaaaactgcgcttcggaagccggatttttccaaaactcccacggcctcaatggttgttcctgccggtgagcataccatatccttcagttcgcctggatgttttcctgtctccagcaccatcttggcgcttcccataaccgcctgagccgcaaattcataggcctgtttcctgggcattccgtctgccacacctgcatccgccatagcttcgatcatcataaacacataagctggtgaactgccgctcaaggacatcacagggtcgatgaggcgctcaggaaccacctctgacctgccaaagctgtctgtgatccccttcaccatttccagctcctcctgagtaaccagggaattggggctgatacttgtcattcccgcccccaccagcgcaggggtgtttggcataaggcggacgatcttcatctttttgccgatcgcttcatccagccactttaaagatttacctgcagctatggaaatgatcagctgttccttgcggaagctgtccttcacttcatccaaaacctcttttaagaattgaggcttcacagccagcaccacaatgggagccttctgaaccacctctgcattgtccagtgtcgtcacaacgcccagcttctccttgctcctttccctgccctcctgggtaagatttgatacaattatctcatcttttttaaaaatttcttttttcaagatgcctccaataatggctcccgccatattaccgcatccaataaaaccgattttcatttttttgatctcctttatcctgcaaattcttttcctacagtttatccccgtccttcttctccgcagcctcccggtccaggagcagatactttctgatcatgaacagaacagctatggctcctacaccgatgagcgtctcccaggtacgcagatgctccacgatcatctgccgggcaatggcaaacatcattacctcaataagcgtctccgcggtaagcttgcacatcatcttcacaaactccacaccaaccaccagagacagggcattggaaagaaatcctgtaaaaaattctgaatccatggaagatatgggaatcccagtgagtcctttgatcatggaaacagctaccatggcaatgactataaggatcaccaccgaaagagccacctccgtatagcgggcaatattataaataatgccgttaaaacgtttgcgaatgacatggttcgtgagattttttttcatccttctgtcctttctccatcctttttcaccgctgctgttcgccggtaagcttgtgccggataacttcctgggtggatacagaaagcttccattatctgcagtccccattccttggagccggcacaaatcccacatccttgaaggttgcttccgggtacacagtgaacggcggcttttcccctcttgggggacttctatgtatattataatattttaacattaatttcctggtctgtcatcaccttagaaaaaatcccgtctgccccgctcacagctgtacaacggcaaagaggctgcccttgcaacagggcagcctccggaggttttcttataaaaaaagagggggagccaggctcttcaatgagcccggcaaatgaaaagaaaaaagttatgaaaaaatctattcgataaaaaaggtatttcctttgtttgataataatatacctgcaatttgtgatgactttgtgtccatctcataaaaaaagtgtgaaactatcttttgaatttataaacaaaaaatgaagaaagaaaatcctgctgttatctcacaggcatcctctaaaaaatagactccacataccttcgcatttcctctctcgaggaaacctctctggctctgtccacaatccgctcccgctcctccttgctcagatgagagaaacggttgagcacatctgagtgcatagccagctccatggtaaatccaataggcagctcccggttgtcgatcatacttatcacccctggcgtttaataaaagaaatatcaaactccggattataataatagaagttcttttcatccagggtatccttgattttctccagggcctctccaaatctctggaaatggacgatctctctggttctcaaaaatttcaaaggctcccggacctctggttctgtgatcatacgaagcaggttgtcatacaccgtccgggccttctgctcagccgccaggtcctccataaggtctgccaccgcatcacccttggactggaattcacaggtattaaaggggatccccgctgccgcctggggccataaggccttggtatgatcaatataataggcatcaaagccggcggtcttggcctcctcaacggtgagatctctggtaagctgatataccatagcacagataatctccatatgggcaagctcttcggtaccaatatctgtcagaagtccccctgcttccttggagggcatggtatatctctgggacagataccgcatggaggcagaaagctctccgtcagggccgccgtactggctgatgatcatttgagcgatctttggattggtcatattaattttcactggaaactgcagtcttttctcataagtccacattagatacacgctccttcccatggcatagggccctgcgtccagggaccctggcagtcttttgtcaatggatagtacttctggtcatactcctgaagaagctgttttctctgctgaatgagctgagtacgcatggtgagcgcctcctgctgctccggatgggtatcaataaaaagcaccagatcgtcaaggacaaagctgattccgctgatctgtgacatcagcctttccctttcctcctggcccggggcccgaaagctctgggaagctatgggcacttctgcccctggaagactctcagctgcaaaaaaaggcttattcagctccgggaatatggttcctaccttcaaagcctgatctgcatcatacaactgcccattccactgctgcataggcacagatgccattgcaagatgttgtgactccataataattcctcctttatcttgtgatggaattagtatgtgcagaattttgtcacttattgcaggagagtatttcctttaaaattaaaatcgtttttgtaaaaaaggctttttagggatgtcatccatcttcgttgaaatctgtcagcagaaaaacacgctatcctctatggcaaagaatagcgtgttttcattgtttttcttatttccaaaggaaattgtcaaatgcgtccacagcaagctctctccacaaagaccactggtgtccgtagggaagatggttattgaccataaaatctacacctgcttcgctaagtccatagatatactcatagatacttccttccacggctgctttctcttcattaaagaaaacattagtggtaacaaagtcataaaggccatacccaatgaaaagtttcacatcttttaattcctctttattaaaatctgcatgtacgttttccttcataggagaactcatatcaatgtaataatcaaaaacatctgtgcggttaaagtacgcgttcataatcgctgcaccaccctgggagagcccgccgatggcatgcttagaagaatcggtggatacatgataatcttcttccatgtgaggcagcagatagtccacaacatattcactgatagcatcacgatcccatctcaaatctgtatcctctgccggaaaagattcaccattaggagtgacaactaccatagggtcaagacgcccttctgcaatcatgttatctaatatatttgccagtccattattaaaccagcttccatcaaagcctccgccgccatggaataataccagaataggatactcttcctctctttccttatcaaattcataaggcagatagactccgtagcttgtgttaataccactgtctaaagagaccttttcaaagaaaacctgtccattttcaccgtcccggggtgcctgttcctcaacgcaaacactgtttgcctgtttttcttcatcgtaaggaacataaacggatgtaagtgccatttcccctgtctctatttccctgtctgctgtataacttgggttacttggatccataaccagctctgcgtccgtataatctgtcaactctgcatccggagcgccgcctacataatacctataattatatgtgccattgggcagtggaattgtgtaggaccaaataccagtttcttcatctaatatcatatctgatgtaggccatccctccgtctgccataccgtatagccgtcctgccattcctggggtgatgcattagaactggtcacaactgtactgcgtgctttatcggaaaatgtccattctccgaatattcgaacacgagatgcttccggatctttatagcggaaggtaacataatatcctgtaggtgattcgtcagatttcaccacagtagtttcctccaatgcatcgaattcctcctgcgtatagccctcgtaagtgtctgcccaaaccgtgcctcccacacctaatgtcaggcctgcgcataacaatgtggcaacaaccatttttttcttcatgtttttcattcctccttatattgttcaaattgtcttttggtaattctaataatactttatattcatcaattttaatatcaatcttgttagaggaactatcagttttgtacgattttgccaagaatcagatttttgtatcttgagtttccgcaaaatgtaatttcaaaatagatataacttcccaaagtaccaacctgctggatttttgaaagaaaaagaacaacagcctgttgagcagacgcactgaaataagccccgctggaaccggactttgggagaactattcttttatctatttaagcggctaacttaaggcagagttgacggtatgccggtctctttgtccggaaccagagcctgacgccctcttttgcatacgaaagtatgccagagatacctttcgcaagccgataatagcagaagaaaactttttcctttacaggatctgctgtttttataattgcagcctttagtgcattggtttctgaaatcattgagatcattgccagaaatgccatgcatagggtgatataaaagttaagcgcattgatagcacaaagctttcgtacacggaagttttcgaattggaacatctgctttttacaacggaaatattcttcaatcttccatctggaaaaataggttcttgccacccgaattacatcttctttcgatttaatttctttgttggtggcaagcatcattggatgttctgttatgccataaacaagtaccagataaatctcttttctggatgctgtaatctgaactttcacatgggaaagataggcttcatgtttttttcctttataaaatacactggttttgatcttgccttttctacgatcgcgaagttcggtagcaggagtccattttccatggtacagaagttttcttttggaagtaaggcgaatgacataatcctgtttcaggtcatccagttttaggaacatcttgttatcgtcataaccacggtccatgcaaaaagtcgcttttccaaagagtgcagcgccctgttccattgcattaaaagtgattgcatttgcagatttatagtccttttcagaagatgaatgaatgcgagagaatatgctgacagggtgattgctggtagtaagaacacaagcttctgtgacatgatagccttttttgtatatattttttgtcgaagtgctttcagaaccatcgcggacaataccaagtgactcaaatttataaccatcgggttttacaacatcactatcatcgatgtgaatcactggttgagagggggcccattttttcaccatctgaagataggaaacagccgactttgtaggggtacctttctccagatgcctggaaagtcgatcaacaatgttaatctttttagaattctcgtgaagctggtcaacaacatctgttaagagacaacttttagccgccaacatgccgtaagtgatatccgcagtaaatttacgttcaggtttggagagcagtctagaaattttatttgtaaaagtaagaatttttcgtttcaatgtgtaagtatttgatgtaaaattagccataaggaatctccttctttttgtttagtggattattttgtggtgatttaattttacatcaaaaaggaggaagattccttatattttaggcatttattgaaagttgtttataagaacacagctaaactcaaggttgtgtggatagaactgcggaaactcaagttttgtatttcttgatttgtgtatttttttctgatataatttaaaaatagccgcaagtttccatcaatcacagatgttttctatatttacattttgtccagagaatttttcaagaagtttttaggcattttcctgacttacagggggaaggggcagatcatgagcaagcttgataaaattacaagacctcgttctcttcgaggaaagcttatcctgtgggttgtcgtttttcttattccaatactcattattctgctattttgcaccactaccatcacccgctcctatgagaatcaaatgcggtcttatggacaggaaatgatcagtccctttgctgccgagattgatactgtgctggcctcctccatgcgttacattgcaggctcaaattatgatctgacgcttatggatccggcaaagcccgaagatgcccttaccaagcttaaacgcattcaggaccttggggatcaaatctctgacagtctggctgtatatacagatattgatgccgtttttttatatgacgggactcagatttggttcgttcaaaactataatcgttcttataatacaagcctgaaggcttccagggcactgaagaatgttctggatgccgccacccaggagcctcccatctttcagcagggatatctctcttttgaagctgacggagcttattacttcttcataggagtaaatgtaccaggaggaattgcagggtgctggttccaggaaaattctcttcttcagaaacttcaggatgctgccttttctggattagagcaagtgatgttctcagacccagaaggaaaattacttacaggagcttttcattccttttccgcgaaagagcttgaccaggttatgtccagctatataaaatcgtcttataaattaacctctgctccttatactttggtagccttatggaaccccaatattatgctctcctcttttgagaacttggctagattagtttttgttggtcttggtgccgcctatgccttatttattttttatcttatttccttgagaaaatcggtaattcagcctctgaaccggctggttaatgttatccggcagaccagaaaaaatgactttcaggaaatctcagtgaaccccagagaccctatggaggttcaagaagttttctccgctctgaactctatgattaaagaagtgaaggacttaaaaattcaggtatatgaggagcagttaaccaaacaggaggctcagctgcagctttaccagttacagcttcggccacacttttttatgaatgcgctcaacagtataataagctacgccagaacgaaggattatatcatggtacagaagctggccgcctctcttggcacacatttccggtacctgctatataattcttggtttgtaactgttgaggaggaattagaatacacacaaaattatattcagatgcaggaaattgcacacggaaaacaatatctatactcttccaacgcctctgatgaggttctggactatgaaattccaatcctctgtattcaagtttttgtggaaaatgctttgaaatatgcccaggattccaaaagagctctggaaattcaagtgcgcatctctctccatacagataagtcacttgaacgaattcggatcatcatagaggacaacggcagaggcttccaggaagacaccctttcccaactctctaatccctggacttctaagccgcaaaagcttactggacggggagtaggtattgctaatgtacgtcagcgtttagaaattctttatggtcacaatgcatctgtctctttttccaatcacccaaagggcggagcccacattgagctccttcttcctggcagcatagaaaaaaggagtttttaacatatgaaaaaaggttttattcttctcataatgcttttaatctttttctcctgttctgtatttgccagacaggaaaaagacatatcatcgcttaccgttccagtcctttttgagattgaaatcccttcagacatggaattgatcaatgaagctgtcaataaaatcactattgataaattaggcgctaaggttgagctggtggcacttctctataactctgcctcctcctataaaaaccagcggcgtaaatcagaattgtctctcttggagaaacaagggatatcttttgacgtacttccagatgctctcacagatacttcctttatccccttggatacacttctccaagaacatggccaggatattttggctcttattgatgaagacaggctcctgctttccagaaaggatgggattctctatgagctcccttcagtcagtgactatgtgtcctcctttggcctcaccatgcgcaaagatattgtggagaaatataacattaacttgtctcaaattcataattttcaggatatagaagaaatgttcgcttccattcgagctcatgaaccagacctatatatgactagtccttaccgaactcttgggagccttatagacaggctgagatatgcaagtattgatgtaaatccttttttcacactctctggcgatgattccagcatattgatcaattattatgaaactgaagaatatgaagatatgatttcccgattccataaatggaatcagcttggatatcttccctcaccattgtgcctccaggatttaaccgcctcccagcttgtggaggcaggggttttgttttcctatttttccccctataagccaaatatcgaatacgaagaatccttaaactgtaaaagagacatggtatccgttcctctgatgagtcccactgttaccgcccgttcccttgaagccaccgtacactggggaatcagcaagacctgcaaggaccctgagcttgctatgaaatttcttgatttactttatacagataaggatttagtgaatctgctcatttatggaatagcgggaatccactatgaagtacaaaaagacggtacaattaactatccttcaggcgttacccaggaaactgtaggctaccaaaatacacagccctggattctgcctaatcaatatatctcccttgtctgggctggaaatgatcctctcctatgggaacagacccgggaatacaacgagtctgcccctctcaagaaaaccttattttttaattttgattccacaccagttgcgtctgaaatagaagccctgaaggaaataacagaccgctatatttacggtttggaatctggccagctaaatccacagctttatttaccccaaatgcttcaggaaatggcggacgccaatattaaaaaagttcttctggaggctcaaaaccagtttgaccaatggcggattaacacactctcttctcaccagccagtcaacgaataaggatgaaaattatgaatattctaattgtagatgatgaaattcctgcagtgcagggaattattgagatagtaaattggaaggcattaggaatcgaaaatatttacactgcctactccatggaggatgcgatgaaacagcttcagtcacatgctgtcccgattcttctgaccgatatagaaatgcctgggggaacaggtctggatctaattcaatggtgcaatacccgcagtaccctttgtataagcattattttaagcggatttcccaattttcattttgcccagcgtgccatacgccttggtgttttcgaatatcttttaaagcccatagatgacaaggtgttgcagaccgtcctgaaccgggccgtccagtatgtaagaaatagaacctctgacaagatcactggttcagatgaccctctcatatgccgcctgaaaatgtatatttacgatcatatctcccaggaaattacccggaaccagctggcccagcatgtcagtctctccccggcatatctgtctacgtattttaaaaaagaaacaggaagcacaatcagtgattttattaaaaaagagcggattaactttgctatgcgcttgctgctgcagaccaatctgcccatcagcaccatcgctaccaacgttggatatgattctctgtcacatttttcagctcaattccgctccattactggatgcacccccagagaataccgcaaccggcagaatgagctttaattacagggataatttctgacacaggaacagaacattcgcagcatattcaaattccgatgttatctgaattttaaatacgattcagttctagggccaattgtcaatgaaaattccgactcgctcttcttccagtttttaaatacagcactggctgcatcatgcatggccgccaacacatgagtcacgtattgcctccattatcatatattatatatcagcaaaacaaggaggctgtatcatatgaaaaagaaatggatcgcaatggctgttgctgcccttttggcggttacagcactgcctgtgaccgcctttgcggacaaaaaaaattccaaagaacctgagcttacaaaggtaaccttaaacgaagttgcccattctatcttctatgcgccgcaatatgtggcaattgaggaaggatattttacagaggaaggcctggatctcacgctggtaacaggttttggagcagataaaacaatgaccgccgtactctccggagaggctgacattggctttatgggtgcagaagcttccatctatgccttccaggaaggcgccaacgatccggttgtaaacttcgcccagctcacccagcgagcgggaaattttctggtagcccgtgaagaaatgccggacttttcctgggaggatctaaaaggcagtaaagttctgggaggaagaaaaggtgtctacctactcaacatgtaaacttagaatctattataattatctgcaattggatagatagaatgatgaaatctcgaagtagtattcaatctttaaaggaaaagcagaactgacaaactacatttaaagtaattgtcaacagttattaacttgatacctaaatgccacaactatactcactttaaatataagaaaggatatataacaccactttacaactttttcacaaaaaaatgccgtacagagcactttggtgtataataagtttgccaacaaaatatacgaaggaaagtgaccctgtacgacaaacttattatacaacgaaaagaacctgattggtagacttcatcaatatttttttatttattttgaaactttttctgcaccgaccgccgagactctgttcctgctggttttatccatcctggctatggaatccgctcattccatccggttcctttaccggcattttttatcaggcataacacaaaaatcccttaacgctttttactacgcctgttcctatgctaaagtggattattcccgcttcatgaatgtgaccgcatccatcgctttaaagctggtccctgactccttgaagctgcagcccgtgttcctgtgtattgacgacaccatggtctccaagttcggtaaaaaattcgaggatgtgtcgaagctttttgaccatgcagctcataacggctctaattacctgaatgggcactgctttgtcagccttatgctctgcatccctgtatggaagaacagcaggatcgtctaccttgctgtcccccttggctaccgtatgtggcagaaaaatgagaccaagctggagcttgctgcgtctatggtgcgtcagactatgcccaccttttcagggaagaggaatgtcatcctcctgtgtgacagctggtatgccaagaaaaatctcacatgcgttgtggatgaatatccggatctggacctcatctgtaatgcacggtatgactctgtcatttacgacctggcgccgcagcggaccggcaaaaggggccgtcctgccaagcatgggaaacgtctttcactgaaagaggatttctgtctgtccgacgaaaagattggggattattacacaggtgtacgccgtgtcctcacaaatatttttagtggaagggaagtccttgcctatgtcacatccacagagaaagagggcggttccagacgcctatttttcagtaccatttttccggagcagatgcagattttctgtgcatggcaggagaaggcacctttaaaccagacagggggcggctggatgaaatacatccccttgttctgttatggtttccgctggaacatagaaattagctactatgagcagaaaacattctggtcattatgcagctatatggtgcggagtcataaagggatcgaaatgctggtcaacctgatcaacatcacttacagcgccatgaagatactgccttatcaggatgaggcattttcaaaataccgtgaagaaagcgtgcaggaattccgtttttttctaagtgaacagatccggcagcaggtattttttgctactttcgtgcaaaataccgtaaccagcataaaatccaaaggtattataaaggctttgaaacagctggttcaggaacaatgctggcatttgtaaaacttgtaaagtggtgatatataatatatggattatcaattagaactaaaacaaattgtggatttcccacgctgccgcatttaccgcgacttcatacagaccttagtcactgacaagagcatccggacatctggaggctcttttcttttttattaccttgtgctctgctcctatgccaactatcggacgtcttatcgccggatgaaagccatcaactatacggtgggtcaggggaatgggtatgcaccatcggggaacttcagacctggttccgatgccggttccagcaccaggctctttccatcctgaaattctttgaagcacagaattatatttcctacactgttttaggcaaaagtaagatcattaagtttaaaatattagactggccgaaagacaataccatactgaaatacaactacccctgcaaaaaaatgcaggttttttctttttccccatcgccaaagtccatgaacttatcagtatcgggaagtgttcagagatggatattctgctggacttatggattcatgctgtttacaacgatccgtctgttagctgctcagattccggtccggtagtgtattaccgcaataataccggcagcccgctcaccagctttcatacgttgggagaacgctggggacagtctaaagcctctgtctcaaggctgctgaagaaactggaaaacgaaaaactcatcaccctgatatcattcaaaggaaagcatggcagtatcatttaccttaacacttacttatccgttatgttcaatatcagtaatgtgatgatcgacaaggaggagattgccatgagaatgcagttacccattcatatcccggaagaaccgcaggaattatgcgtttcagaaactgtcacagaagaccagatcaccgttccagaaaatgattcctgcgttccagattcacacatgaaattcattatccggaaagtggtggaaatgttgcatacacaagggattccatgctgccactgccccaaaacccaatatatattatctcccttatcagcctgcaaggatatattaaaccaatatacgttaaatattatctgcccctatgggaatactgcttaccgctttgaactcaccatcagccgaaaggatgatcccgcatggaatgaacagttaaaacagcttgcggctgctgtgaagggaggtgagtaacatggcaaagaaaggtacaaagctctataaattgccgggggatgactcgcgttaccatgacacctacaagttcctacgccggtaccgggatacaaaatacagtctgatggtggtggtacggcagatggaagcacagttcttccaaatggaatatggcaccagtatcgacgatttcctggactctatttatgctgcaggtgtggaattaaatggcaatgacattgctgatcgcgccacaagtattgagcgaagcaacaagatgctgaaactattggattcttcagttgatctgctccggaacaaccacaaacatggtgaacaatattactggatactctactatgccttcctgtctccccaggaactgaagaatacggatgagatcctggataaactggcaatgcatgtggaaaatatctcttaccggacctactaccggaagcggcgggcagccatcgaagcattaagtaccatactgtggggattcactgccagggaaactgttgatgtactgaatcggttttttccggaatgagattcgacatttcatgaataagcactcataattaacagtaaaaaagttaaggagtacctattcatggagaatttagaaacactaatcacaaagtacctgaagaactgtgaaactattaaaaaactggacaaaaagacactgaaagcctatcgaattgatttgacccagttccattcctttatgtcgtctcatccagattttcttgacaaaaaggccatcaatgagtatgtctcatcattgcatcgaaaatataagcctaaaacagtaaaaagaaaggtagctgctatcaaagctttttttcattacctgatttacgaggaaataatatttctaaatccatttgataaaataaatgtgaaattccgtgaacctcaaactctgccacgaacaatttcagataccatcatagaaacattcatcgcaactatgtataaacagcggctacttgctacgacagtataccagagcaactgcatcctccgagatatcgctgtcatcgagctgctttttgccactggcgtcaggatatctgagctatgtactttgacgctaccacaagttgatttaacatcctataaaattgttatttatgggaaaggggcaaaagagagaatgctccagataggaaatggtgatgttagaaaaatcttactggaatattacttaacatataaagcagacatagactcaaccggatggttttttattaaccggcttcatcagagattctcagaacagtcagtacgatcaatgattgtaaaatatctgcatttagcaatgatcgacacacatatcactcctcacatgtttcgccattcatttgcgacattgctactagaggcagatgttgacattcgatatatacagaaaatgcttggtcatagctcaataaagaccaccgaaatctatacaaacgtctctatgtctaaacaatacagcatattatcaactaaacatccgaggaataatatggatatacactgagaaaaacaatgactcatagctattctgccttgagtcattgtttctcttataagccaatactctctttccatttttcatcatatatcgtatcaatataacgttccccacggtcaggtaaaatacacaaagatacacttgtctgtaaatcagtgtgactactatactttaaatacgcggcaaaaacggcaccactagatcctccagcaaatatcccttttttcaataattgcatacatccatcaatacattcttttgtattaacaataactacgtcatctatgagtgctcgtttcaaatttggtggaacaaaatttgcgcccattccatttatgtatttatgaatgtttttttcttgaaaaatttttgatccttctatatccaccgctataatttgtgcatcaatttttgatttttttaatgcatttgaaatcccagcaatagttccacacgtactaacagcaacaaatatataatttaaatttttcatctgtgctatctctactccaattgtcttctcatatgcctcacatatcataggattatcatactgattaggccaataaatattactacctttgtccaacatgttttttacaattttaatacgttctttcacatagctgccattattatcacaggtttctgcaataatgatattagctttataaatttctaaaattctcttatttattcttgaaatcatgggatcaatgacacatgtaaattttatacccctaagattacatattcccgctaaagcaatagcaaaatttcctgatgaggattcaattacttctgtatcacgattaattattcctaatttaatctccttatttatgatatagttagctgcacgatccttaatactaccaaaaagatttgttccttccaatttaacccatacatttttttcttcacaaactctcactaagggagtgtttcctatttgatttaatatatccatttttttctccaacgtaagataatactcaattatcttttatattttactgcgaaagagaagggatagcaagtatgaaatcaataagctggtctaaaacagaggatattattgatagagatagtgaatccgaggatattatcaaagatatcaagcaaaatacttctaataaagtacatatccttttctctaagacagctaggggaaaaagctcattagtagccaaggtatatgataaatatgatggtgtaaagtatgatacaattcgagtcaaatctattcccaacaatacagttgatgaaaatgcatgggaattccttgaacttatttttcatggggtatcagactattatagtcgagaagacgattatgattattgttcactaactttcgaacactatttgtcagagtttaaggatccggaaataaatgagttacgtctttctgcggtaactaacgaaatagcgtcatcaaacggtaaaaaggggtttttaaagagtttacttcatacaacagccaaaaaggaattaaagctagatgagtatagtgttcaaaaatataaaaatgatgaatcttttataggtaaacgtatcagaagtaattatataaaatatgttttatcacaacgttccgttttgttaatggtagataatctgcaaaatatgggtaggtatacgctacaatgtttaatagagtggcttaacacaacgtataacatggctcactactttttatttgaatacacaattgcagaagatggcaatctgacagggttggaatcttttgtagatagcctttctccttatgccaatgttgttacaacacttattcctgacctacctcctcaatacataacagatgtgatcagccatcgaatcaatgaaatacccagtgatcttgattttaatgttgatattttgaatcattataagacccaatccaatggaaatatcaaagaaataattgattattcctttacttatcaaacgcaacggaacagtagtgtggactctgaaaatgggacttacagaaatatcaaaaaggtatctgaacccgaaggaaaatatttgttaggaatagttattcttcaagagggtcaaatgccggtatcacttcttagaaatattatatcattttctattgaaatcgaaagaaagctgcaggaactagtcgaaagtaatttgattgatatatatcatcaaaccattgaattaaatcatgcaagcataaaagaacaatgggaaaaacatattgatgagtttaaaacatttgattccttagcatataaatcattaaaggatttttatttacccaagctttctagtgaagatatagaaatacaaaatgaatcgtggaaacatttgttgaaactttattctcaaagggagccctttttaataaaaactctcctgcctcatttggaagaaaaaatagccgtttcagtttcctttgaaaatgtatggaaatatgtacgtgaagtatataagagtataaatagtaatgaaaatgactatgaaacaattgcattccgtctattggaaatatgttacaaactagaactatataaagagggagctgaattattagaggatattgagaagcatattcaatatattgatcataaaaaccttttacaaatacataagctactctatctggctgcaaatgaccatcatgaagaagttgttaaatgctatgaaaggacaagagaatccgtagatatggcatccaggactggcctcaatctaatgctaagtgttttgtgcagttacagatatgtgggtaaattagaccagtgtaaagtaattcataagctagtattagggaatccacagtaccgggactattttgaatatgcatattttttgagattgacaaatatatacttgccgaataaaaaagcacttaagtatgccaaaaaaagtgttgaactttttcatgataaaaagaacaagtatcaagaaggcaaatcaattattacatatgcaaaactacttgcgggactgggaaaaatagacgaagctcttcttgaacttgcacgtgctgaagaattattaagcggatataatatacgatgcaatgttctgtggcttaataaagcatcaatgttattaatgcaaggtaattatgatgattatatatgggaactattgtgtaaatcggattatacagcaataactccatatgatcgtttggcaattattgtggtgaaattagcatggtgttatgaaaactctaagtttgacgggctgtcagctttaattatagcgggtgaaaagtatgttatagaagaaccagatcaccatatacatgcgctgtttttttataatgtctatgcactcagtaacttaaaaaacgaccatgaaacagccgatatttattttcaaaaggcgttccaattaaaagaagattgtcgatatcttaaagctcgcttcgatggagcaaaaacgaaagaggagaaagaacgcctaaagaatccatggtatgtttgttatctttctttctggaatcatgatgtagaatactttgaaaattaatcccgaagattacttcttcgggatatatttagtttcctcgaaatatcgggttattattgcgttccacgccactttgcccatatagtaatccaatgattctaaatcttcatcaagtacaaaatgtttgagataaagttccataaagttaaaggaggctattgctgagaatatcccagaacctgcaaaacgaacattattctcaatgaagtaaaatgtgttattatattttttgaaatctatattacaaaaacctggaagtttatattgggaacatattctcttacatatatttataagctcagcttcgtaaactatttgacttctatatgctgtaccatccttcatttctattgttttccgaggaataataagttttggcgacccatttttgtcagataaaatatcaactatataagtatcaccttccaaatacggttgaataaagtagtcgttattaaaatgattttctatatatttctcttgtgttaaatcaacaatgtatatgcctaagctattcactgatacccttttgcgaaaaataacttttttttgatttcgtaaatccgttattattggtggtacacaaatcccatttcgccctagttgttctgtacatttaagcttatctttaaataaacgtacagtatctgcatcggctagatagtaaggggtgtctatcatacaattgtatttcgataaaaataaagcctctgcatcagaagcaggtattagtagatcaatatgttcattatcatgaatatgctttaaaaattttagataattttcttcatctgaaatatgtggggcaacatagtatttatctacgagtagacttcccgcatattgaccatagtctagtacatctgaacctataatttcaacatcaaatttttttacatctctcagcaacttaattacggataaagagtttgtactatgaatgttatttatttgtattttcattgttcctcccataaagacaatagttctattcaattacattccacaaaaagataattgagtattatcctctgtttaagactcttttcaactataaattataatcttttttttagttaatatcaatacatattatggcttgaaattggcacagttctgcgattgaagcgtaaatatccccatgctacaatggatattgcttatagtttccttatttgccgcaccgtcacaggtgctttttttgtacctataaaccgattgctgacagcggactgatatttactctgtacttacagttatacgtattacggataaaacgtacttgatacgtacagttatacttacagagatttctttattatcaagaagggagttaaccatgaagacaagagatcagatataccatggagaaggcgcaatgctcctgcggattatcaccacctatcatgccctgctctacgaacaggtgctgcggctctttgctccaaaccaggattccatacaatccctaattaccaacttggtgaagcagggacggatctatcacgataaagagcgggacctgctctgcgactgtctggaagcggcggaatcaccagataaggggacgattgccgctttctgggtgcttctggattttaaggaggcactcatctatcataccagcggtgatttcccaatcaagctccatttcttttctaaggatgaggcatatgaggtgatttacgctggtcttgaacaggaggcattgctgaatcatgtgatggaaagcataccagtaaaagatgctctgcgtttagtcatactggaatctgagagccagtccttcaaactgtgcatagatgatgtcattgcctactgtatcgtggatgattccggcgttgtcagttattaccgaaaaaagtgaggattccatgaccacaaacacaaaaactatttttcaacggtttcagggtattgaaaatgaaatcctgaagctgaacaaccttatatttgccctcaaaacaacagatttacagcattatccggcaaattatgaggaactgagtacagatgctgctctccgtgcggagcgcattgcctgccagcttcggaatctcgtatatattgcagaggttccaaataagcctgaatacatgcggcaggctgtgaaagcacacggcataaaaattgcccaggatgagggtattttaaccatccatctccccggcctgcttcccaaacggaaggtacataccaacacagctttcctgcatgagccgctgaacttcgcattactggagtacctaaaagggcatgacttaacgctttaccgggactgtgtggtctgcttcagccaagtctatgaccaggctatgccgcttcgccgcatacgggattatgacaatcttgaatttaagcaggttctggataccatcgctgcctatgtattactggatgacaccggacttttttgtgatgcctattacacaacagaattaggcgaagcagattctaccgtgctgaacattatggataaatccaggtttcctgaatgggtcgggacgcagaaaaaccgtgtggaaaccatatcggaaatttcctgacatttttatggaaaaaaccgacatgggtaaaaattgccggaacatgcaaaaaactaggttattcagcacttgctgctatttggattttacccaagtataggcttacatgggtaaagattggactgaggtgatgcttatttgattcatcctgacactgcaaaattccggctgttggagatggttggcatatgcggagaatttccggcagaacaactaaacagactcatatccagtgtttcctatgccgaaaaactggtgacggagctaagaacagaaaaactaatccgcattcactaccgggataagctgcgcggataccggctgaccaaggccgcaaaagaaatattgctgtcccgccgccctgcccgcttccactgctatctgacaggaaatacagaaaccaatctggtacacagtgaagtaacccggcgcatccggctccaccaaaaagcagaaacatatttaacactttttcatgctggaattccatttttcccggatgaaaagccggatatcttttgtgagagccgcgaagctggttctgtagatttgcgaagcctgccccttttttattcctccagagaaatcaaggagctggggccggttacaactaaaataaaaaattccagaagtatggggatcctgatggcgccacattgtgtatacgctctatataacacaggaaacggagtcctcaagcgggaatataagacagaaatgcgcttaaatgcttttctgcaacattatctgcaggggtttccctacaatggacatcccaagatccgggcgattatgtccggacgtgatatggagacagcctttcgaattctgatcagcaccggcggttacaaatgcctctttatgctggatactgcttttgagcatttccattacatcccaaatacttctgaaggggaggtggttcttaaactattatcggatccggaaatgatggccaggttaaaccggctgtgcctgtctgaccagggcagccgccgggaagacatgcccattgaacatgatgccattgataaatccgacacttaacggttcttgaatatgattttgacatgcagcggattaaccggtttaatactgggctgaatgtctatggcaggtccgggaatctcatttgttttgatttccagatcccggtgctgaaagagtacctgactgctgacatccagttctcaagtattgacctttccaaattcagaaaggggtttttgcatgaaccgtaaatggtggaagtgtattttcgcacttcccatctgcctctgtatcctgtatggaggcggctatattgcacaatttatccgtaactataaaacctggactgccaacggcaattttgccggcaacgggacctatccgcagatgccttccatgcatcccttggaatgcctgtcagcgattaccctttttccttataacctgtatgggatttttatttgcctggtcttattatggctgctgatattcctgctgatgtgcatggggtacgaccgaaatggagtggaagcgccctggccggacatgatgtggtggtttttgagacgctgtaccttgctgccaaagacaaggatattgagattgcctctcaccaggacatcaaagataagggacagaccgtgaaacttatcgaggtaccaaaagaaaccccgaaagagacgcccagtgtatcctccccggtaaaaaccggagatgacaccaatatacttctttacctggggattgcaggcgctgcccttacggccgctgttatcctaggcattttctactttaagaaaaagaaaaaagaagattctaaaaagtaactgttgatttttagctccatacaggcggccagaagtggctgcctgtttttaaggtgataaatagggaaaacatacactgcagtggggatgcaaaacatatccgccgctttttaaatacttatcaagggaactggcacaattgcgtctatgttgaatgcgtctcctgcaaagcacaggggacctgtaggaagccgggattcattttccatccggatgaaaacggagaacctatccttctgcctttatccgacgcaaacctcctttttgcgcgtcctccggaatctgaagaatgcctgtgtgtccttacacacgcccaatttcttaccctatacaagacctttttagaaaaccgggaatttccggatggatactgcccatgtgcatctttgctccatgaacaggaagctgcctgttacgattggtaggttgcgcttttattgtcctgcacgtacagaatcattatagaggaggtgttttacatgaaggatgcaatggtcatcgttcagacaattgaccgtatttttacagattttatatttgtgccgatgctttttattctgtacactaggtttaccgcatataagcagcgcagcaccaagtaccggaacctatatcggctttgcctggtgcttgtcgttattttcctcatccgctgcttctgtgcaggttttatcttcacagagattaactatgcccggtttacggacagcggtttatttcctctgattaaagctgtattctatccgggccactgataaaaatggcagaatctggcattatgtccccaactgggaccggtttttgcccttgacctatagatattcatcacccgcttttctacaatatatgtatacagtgcgcagacctgtaagtattgctgactgtatacagcaaaactaaagtgaggtgaaataccatgaaacgacagacaatccgctgcccatactgcggcagtacagccattctccgggacgcatcctatgtgtacggaaataagtcaagaggcggcaagctctatgtatgcagccactatcccgcctgcaattcctatgtgggtgtccatcccggaacctccacaccaaagggaacactggcaggcaaacaactccgggcgaaacgggtgaaagcacaccagatgtttgatcaaatctggcgtcagggtatcctgtccagaaaagaagcctatcactggatggcagataaatttgatctggattaccgctttgcgcatatcgggtatttcagtgattatatgtgtgaccagcttattatagaatctgccaaagtgctgcaaagtaaccatgtgcggcttgcggcagtcggataagggggtgttggaatgaagcagttatctcttatgaccgacacccagaggcagcttacagaaacccatctgtatctggtcccctggatggtgtccgcactgacccgcagttacacatccctgtcagatatggagagggatgatctaattcagaccggctccctggccctgtgcagggccgccataaattatgacggcagacattcatttaaaacgtatgcacaggtagtcatcaaacatgccatttatgattactggagagccgcggcaaagcataaagagcactgctgttcactggaatccatgcttacaaatgcagacggggatacttgggaatctaatctggtaacagaagatccctggaactctcttacagaagaagacgccttatcttcagcagcctccatgtatctgcataaactggagtccgaaaactgtccgatgatcggaaaaggaattgcgtccttacgcctgcagcaacatggatacagcagtttggatttggcaaagcattatggcgtaccggcaaaccgggtccgggcatggcagagcaaagcacggaaactactacagaaggatgaggagctgtatgcactcttagcctgatttgaagggagaaaacgatgtttacactttatactgccattggcaccttaagatttaagaaagagcaatccgaaagccctgtacctgttattatcaataaccatcaggaatttggcatgtccagagaggaactgcttctctggacctgcctggctttccagattttaaccatccatgagttaaatcaaatgtatgaatcccggaaaccgaaagacaccccggacacactgccggtctcccattatctgaaccgcttgatcctccgggggctgattgttaaaggtgaaggcgtatcgggtgtggacgctttatatcggctattaggtgaactttatattgttcccattgaggaacgatttcccgtacgtcttttcagttgtgtgcatcttttcccgaaagggaagatcaaagtctccgattggggtaaggttttaaggaaggcgaagtgtcctcccattgaaaagaccattctgaagctggcacagaccgttatgctttctacggcagaacttgtaacctgcattgaccaggggaaggacatatataccaatcaggatgtattagaggttttatactctgattctgagacgacctatagaacccttgccgatgatgccaagctcaaccatacgcagtatccggtgcttcagatgattcgcagtaaatcctatctggtgctgaccgacacctgtgtcaaacgggaaccggcgctgcttggtaaaacccatcagcttatcttttgcgggcctgataaaaaagaatatcagttttcattggataaaagcgtgaagctgctgcaagggcaccattaccgcctgtacttccggataaacccaaatcaggagaacagcctgttatcccaggaattccttggatatgaagaaatccaggtcctaaataaaactccagccggtgccataatataagcatgacatcggctggaactgatagtttttcaattttgcaaactgggatttatagccgccaccatacgctaggttattctttacaataaacctctattgttcttgtattatcaatacttataataggttttcccgaaccagattcaagcatattctttttgagtatgttcatcggatcgtttattgtaccgccttgaatcacatttaactccattttaacattatcaggtaatttatctaaataaacagaaacgcctcgaaacgcgtttgaagctaagccatccagcgtgatattgtggtccaaatgatcagcctctaagtcaagaattacagatgaatcgtttgcatatatgaacacatccgagttgatagtattcagggaaacgctcctgaaatcgcccgatatttcaatgttttcaaattctttctgcggtatgcctatcacaaaggaaccaagaatgttattatccgcttcagcattttccatcataatgtcaatgtcaagcacctcaccattctcgtcacactgaacttcatatgtatgagaagtgttcaaatctgcattacaaaactcaaagttttcatttacactctgcttgatgacaatggatctggcattcccacttatattgacatgacgaatattttcatccgcaatatattgatctattgttggttgcatcacatcggagttagacgaatcagattgcgcgttattttcccggggatataagccgcatccatttgttaacaatgtaaagagaaaaacaagtaatattagatttttcaatttaagccacactccatcttttaatctgcatttttgcagtcgtaagcaaatcctgctatttctttgatcatcatgatcctctgctctggcagtcgagtagactagagccttgcaactctagcccctcacagatccgtacgtgcggctttcccgcatacggctcctcataataacatttactttaatataagctatagtacgtcttaggttttgctagcggataacattttaacatgtcccagtatccgctccatgtataggctcttctgcaaccacggcgatttactgctttgaaaaggaattgctgtaccctatggagaaatgcacacaatcttctgtaattccatgtcactccatagtatcggtaatgccctacgagctttacatttaactcttttatgatttctctgaccggtcggtttcgattatcatatatccagtgtttgtactctttcagcttgcgttcaaacttcttccggaatgtttgtaacttaactgcgaatgttccctttctggttttcccacactagaatgtaaagccgagaaaatcaaacgtttctggctttccttctcctttggacagtctgttggtttccgcaaatctcccaaattcaatcagcctgctcttactgctttccagttcaaggttgaatttttccatacgctctttcaacgctgaatagtaccattctgcctctgacttgtattggaatccagctacaaaatcatctgcaaagtttaccagaaagcagtcgccttttaatgtctttctcaccacaaatttgaaccacaatgtcaacacgttatgcatgtatatatttgccagtattggactcatgacagaaccctgggcagaaccttcctctgttgtttcaaattctccatcttccattattccagcctttaaatatttctttatcagccagagcagactcgggtcttgaatatgccattccagaaatctcatcatccagtcatggtttatgtggttgaaaaatcctgtgatatatatacccttaatgatggaagtggtttaaaagatttgttctttaacctctgtactaaatcttcgatatttctatcgagattcttcccgtattcttcctttgtcaccttatcaacaccaaccgccttcttaccatctaattctctgtggcattgtttcagtaagtcagcatttatcaagtgatatatgcatgtaaatacaggtttctttgattcagccgatatttcagctattctttctaatttcgttcccattattacctccgtccctgagtacggataatgtgtcctcagaaagaccgttattatgcagtccctttcctccattggcattacccaatttcatcagtactattggactgtcagactacctgttatccatttgaagctctccgttttcagttgaaacttcatactcttatacgagagacaacaggttctccccagttgatgtgtacccacaatgtaaaacatgattggccctttgaccccgcagcgccacacaattctggccaaaatgatttgtgtgctgttgccttccgcaccagttaagacgtcggcctactgaagttaacttttcgaggctcaatagcattacaaccctgctttcttgctgtctacgcttgtcagttgctgttaccagcaacttcccaagactcgctattatctggttggctagaccttggataaatcggattcccaccgatttggttacacacccttagctgggtgcacaactgggatttgctatattctcaaagaagttccaatgctcttttatataatggatctaattcacacccgcaacttccgcattctttatcagcctgtttaattgccaatactaaagcgtttttatcggtctttccatctaaccattgttgtgcgggaacagctattaaatcccaaccagacgcaacgaacttctccataattgattttaattctcccataatgcttctcctttcaagatggcaacttcaaaatttatataatagatatcatgtaaacaatgcttgcagacataagagaaattacaatccccaacacaagtccctttatggcacctttaacatgaaataaataattcttgtattctctgtccatatcctcggttccagcaattcttaattttttactatggcagaatacaccaatatcaagaacaatcacatcaaagagattaacggcaaggaataggataaacacatgtaaaaatgccgtttgaaagttttttgctcctgaaaaataggcgactgctgacaaaagaataatgaatacaaatacagcaataaatttctgtataatgtgcttttttatctgtgcttttaatagaacttctgtattggggtaaagattccactcgctttctgatttctggcggatatgacataatatatttaacggggtctttatactgtgttggtaatataactgctgtaaatattatacaagcaattatacactctattagtgaactactcggcaattgaattaccgaacatctatatgccgcaccttcggtgctaccataacgggcagtccatgcgcccaatattgctagtcctttcggacttacacaattactttctgcggacagttcagtccggtcgcttctggaaacggaagtttatttttttgcagatacagacgcaggatattatatgcccccacgcagtctgcattatagatatccggctcatctatatataatccacgatattttcgattctgactttgggcaaacgcttttcccactttatcacttttcggactgcactgactgctgtaattttctttctgccggataatccttattccgtaccgtttcagcttatactccagtttctggaggatcttttcatacggaaaggaatgaagctgctgattgatccttccaagatcctttcccttacgtatccccttcatatctccaattacaaccgttgtgatatgctctgcctgacaatactcagccacatatctggttgttttatgaataagatcagtaactttatttttcttctttcgatataggaatatcacttttatcatttgcctgatttcttgcataagaaccaaacaaatatacacgtttcacaaaatcattgctgtcaaaaattctgcgactcctcttttgaatgtcggtatagttcaaaatcattcctcatccctccattcttgaatgttctacctctttgttatttttattatacatcatcacgaacaatcagcgcaatcctattcttctatggacttcaataagtcttttgaacaaaatcaaataaatctgatatacttaactggggtacaccctcattcataaagttaaaacaggagatgggattattttacagatttgccatgaagataaagagcatgtttacaaagcggttcgatccggacatattgatactgctgatctatcctttcctaacctgatcgataccattgtcctcaccatgaaacaccacggtttacttgcgcctctagctaagctgctggaggacaaacgcagggataaccggcatattccttttgatatcctgctcgctcttgccgtcacggcaaagttaaagcttaaaaccagccttaccgatgttcctttcgccgtgaacgatgccgccctgctggctgaactggggtggaacgtatgggatacaggtcgggatatcctgaagacagctctggaagtacagccttgtatccacattctggactgtacaaagatcccggttaatcttgctaatgaaaattatgaagaggccagtgttgtaaaaatagacggggaaatcctgcgcggatataagctcggagtgctgcgcggcctcctggatgactctggtgtagtggaggagatcacgtttgggaccaccaagacccatgacatggagcagtgcagggaactgttaaggaacacctcctgtttcaaggagaatgatatcctcatcaatgacaagggcttcctgtcacgtgaaatgacgaattacctaaaaaacgaacggaaggtggactcttatctgcccgccaaagagaacatgatcctataccaggatgctgtacagctggccataaccagcgggaaatggcacaggtttccaaaagctcctgttttgaaatctgtcctatacggcggcggatcacatcctcgcatcgctaagcgttaagcctggtgggaattcctcatcgggtgacgggatattgcgatgctgacagctcacttgtgcaaaatcgatggtttttcctctgtaaccgcggagaaaaacggaaacaaggattgtcatcaaatgattgaggtacacatcggataaaaataatccgagttttagagatttaaagtaattgtaaatactgttagaaggatgtatactgtttgcaacaggcacccccttgttgtatgtggaaattgttttgtcgttattacaattatgcatcattcaacagagggtgtctttattttgtgcaatatttgatatttactcattcatagctttgaaacaagattttgataactatcgacttcttctgaaatttaagtataaattctcaaaacgaacaatcgatgaaaagtcaacacctgcaatgccgtgttatatctaattctcataaatatgtttcctactgtaagaccatctaaaaaataggtacttgtacacgcacgttttttttattttcccataatctaaatacaagggaactatgaaagaatgtgatacattgaagaaacctaactattacctctggaaatctgattttcgaaacgatgcagctttgttacaagcaaaaactaaatacactcaattaggtttccgtgtagtcatataccaagaagggctgaaggaaagcaatatacatgatggattaaaagcactcattaaaaatcattatcctagtgattccaattgacatatcttttgcattaacgcatcccatatttacattgttcatatgtattaaattcattttaggaagggattgaaatgaacgcagggtatgtcagactatcaagagatgatgacaagcgtaactatatttccatcgaaaaccagaaactgatcattaatcaatatgccgcttcgcaaaatattgtaatagaccgctggtatgaagacgatggtatttctggctataaatttgaccgtcccggttttaatttgttgatggaagatttggataaaggcatcgactccgtatttgtcaaagatttttcaaggctcgggcgtcacaatgcaaaggtactgctgcttttggatgaatttcaagagcgtggaaaacgactggttgccattgatgataattacgattcatttactccggatgatgatgtgattggtattaaaacatggtacaatgaaaaatatgtgaaagataccagtaaaaaaatccggcgtgtcttaggcgcacgacaaaaagaggggacacttatgacacacgtaccattcggatacaaaagaaacgataataacaaagagtcaattgaaattataccaaatgaggcggaacatataaaatgcatttatgaattttatatacaaggctctggataccgtaaaattgctacatacttaaccgaaaatcatgtaccaacaccatctatgatccgacatgaacgagaacttgcagaaggaaaacacagtaagcgacagatagcaacagaatggtcagatggcatggtgaaagagattttggacaatgatttttatattggtatttaccgcttacataagcgggcaagggcaactgtccacggcaaagacaaacgaatcccaaaggatcaacaatatatttttgaagaccatcaccctgctatcattgataaaatgacctttgaacttgtacaagatataaaagaaaaacgtgtaagaaataattaccgtggaaatcgtgggcaatggatagggacagaaatccccaatccttttggaacctgtctgttctgtaaagattgtggcagccgtctcaccccgattgtccgcaaaacaaccagcagggaacggaaatattatatatgcagtacttacaataccaaaggaaaatgttattgctctaaggcacatttaattgaagaacaggatttgatggaggatgtagtagcctatattcaactgtgccggaattctctgtctgaaatgattgctgcatatgatttaaaagattttgaagcagacaagaaatctgtggaagaaaaacgttacgaaatcaaaacactgattgatgatcaaaaaaagcagttaaaatccctattttcccaaaaggtaagggatttagcttcacacccggacaacgaggaattgatcaccgaaagctatgatgctttacaaaatgatatcctggcccatgttcactctttagaattacaacttcaggaactaaatgaaacctcattagaaacacctgtggtaaaacagaaactgactacagcactggaggtagtagataccatcatcaaaaacggtaaattagacagaaaggatatagaaattttaatcgagagaattgaagttgataaaaacggcatgcccgacattgagttaaaatatggtctttcgggcttgattaaatacagcccggcagaggaattgaaccgcagggaaaatgctattatccatatgactatgaaactgatacttgaagacaaaaggggatttacatcagcgaaatacctgtctgcaaaactaacagatgccggatataaaaaatcaaagaaatccgtccttccttatattgggcttatgattgatatgggtattatagagcctagcgataattccctgaagccttatactatcgtgaagacacccgctgaaatcaaggaacttatggcaaattttccgcagggcataccgtctgattctgcatgtgaccatgatttacatttatgcacggtcaacaggcggtatgccagagatggtctttgagtacattctgaaaaaaaacaacattgacccctccaaggatctggagattgaccagagtattgacttcggctccaccgcagcggccttctcaggcgggttgggggacttcagcgttgaatttgagccgtccgccacagcccttgaacaggaaggctccggctatgtagttgcctcctgtggtgtggactctggctatgtgccctacacctcctacagcgccaagaccagcttcctagaagaaaatccggagatcatccagaaattcaccaatgcccttcaaaaaggcatggattatgtccaaaaccacactccggaggagatcgcccaggtgatcgcccctcagtttgcagagacagacctggaaaccgtgaccaccattgtaaaacgttactatgaccaggatacttggaaagaaaatctggtgtttaaagaagacagctttaagctgcttcaggatatcctggaggaagccggagaattggagaaccgggttccctatgaaaaattagtcactacagaatatgcacaaaaggctgcagaataaaaaagttgtacacagggcgtccggatttttccaggcgccctttttctcttgtgttccccttccttctattatataattagcccataattcaatacgaggaggaagccctatgctgaactgtgattacaaagtgacggccattgacggtgactacgcccgccttcagcgcctggatgctccccaggaagaggagaagctggtggcccgggcacttctgcccatggaaattactgaaggctgtctgctccactacgagcttatgcagtactccatgctggaaacccattaaccatgttttctgaaaaaaggagaaattatggaatttacatacgaatccaaccgcatttataaacaggatgaacacggaaagcttctggccgaggtcacctttcctgcactggatgacaacacggtaaatctcaaccacacctttgtggacgattctctgagaggccagggaatcgcaggacagctcatggatgctgccgtgaaggtcattgaggagaaagaaaaaaaggttctgcccacctgcacttacgcagcggcgtggtttggcagacaccctcagttttcccatcttctcaaataaacattcgtcaaaacatccagggagttttcgtcatgttgacaatacacccaagtctcaggaaggacttttcgtcaatctgtcaacaaaccaaaaaaatctttgtagaattcgaacctagtagaaatatgcatggttcgctatactgttaacagatgttaagaaacgacataacccataggaaaaaatacacaaataaaatttggaggaatcagaaatggcaagtttatcattacagcacattaacaaacagtatcccaacggatttcaggcagttaaagatttcaacctggacatcgacgataaagaatttatcattttcgtaggaccatctggatgtggtaaatctaccacccttcgtatgatcgccggcctggaagagatctccagcggtaccttaaagattggtgacaaggttatgaacgatgtagagcctaaagaccgtgatatcgcaatggtattccagaactacgctctgtatcctcatatgaccgtttatgataacatggctttcggtctgaaactgagaaaagttccgaaagatgaaattgataaagcagttcgtgaagcagccagaatccttgacctggagaaacttctggatcgtaaaccaaaggctctttccggtggtcagagacagcgtgttgccatgggccgtgccatcgttcgtaatcctaaggtattccttatggatgagcccctgtccaacctggatgctaagctgcgtgtgcagatgcgtattgagatttccaagattcatcagagactgggcgcaaccatcatctatgtaacccatgaccagacagaggctatgacccttggtaccagaatcgttgttatgaaagacggtgttgttcagcaggtagatactcctcagaacctgtaccagagaccacagaatttattcgttgcaggatttatgggatctcctcagatgaacttcctggatgcccagatttcagaaaacggcggaaaagtatatgccaccatcggtgaatacaagctggaagtaccggttgccaaagctaaagttctcaaagacggcggttatgtaggaaaaacggttgttatgggtatccgtcctgagaatattcatgattctgaaatgttcattgaagctactcctaccacaccaatgacctctaccgttaaggtttatgagcttctgggtgctgaagtattcctgtacttcgatgtaaacggaactcaggttactgcccgtgttgatccacgtacaactgcaagaaccggcgacccgatcaaatttgcatttgatatggagaaatctcatttcttcgacaaagaatctgaactggttatcacaaactaggataatcgaatatttgtaggaatctttttatcaggcgctgttccaaaagggacagcgccttgttattaccattttctttcctatttgcagattctcatccggatatgttacaataagaaaaacctatatgtccattgacatcacaaacaaataccatgagaggatgtgacgttttggcaatacaacagatattacaggaatccctggaaaattggagccatatcagcggtcttgacttttgtctgctgaacctagatgaaagcatctatacagccactgcctccaagaagcttccctcttccgagaagctgcagaattttctggaaggctctgccctgggcgtgtccaacaccagagaacatctcttcaaaattccttcctctggcgacacccggtatattctggtggtgtggggaagcggtcctgcctcccggaccatcggggagctggctgtatgccagattgaaagcctgcttgaagcctacaaagaaaagaatgacaaaaatacatttatgcagaaccttcttctggggaactattccggagtggatattttcaaccgggcaaaaaaactccatatttccaccactgcccgccgtgtcatattcatggtggagacaaagcagagcaaggacgaaagtgcactggcaaccatccggaatattttctccgccagaaccaaggattttatcactgccatcaacgatgcagggattatcattgtaaaagagcttcaacccacagacaaccaagacagccttgcttccactgcctatatgctggtggatatgctcaacacagaggcaatgactcccgcctgggtttcctacggcaacattgtggaagacctggaagaactacacacggcatacaaacaggcaaaaactgccctggaagtgggaaagattttttatgcccagaacaatgtgttcagctacaacggactaggcattggccgcctgatctatcagcttcccattgatatctgccagatgttcatccatgagatttttaagaaggaaacactggactctctggatgaagagacactgatcaccatcaagactttttttgaaaacaatctgaacctgtctgagacctcccgccagctttatgtacaccgaaataccctggtataccgctttgagaagctggagaagaaattcggcctggacatccgtacctttgaagatgccctcacctttaagctggctatgatggtggtggattatattaaatactcctccgaaaaaaaataatcgtgccggaacgaagcctaaacaacgcgggcaagcccgcttcagctccccatcccctcactcttttttgggggggcttggcagcttagtgcgccaatgtgcagctgtaaagctgctttcctgggcacattgtgcccatcccacgaagtttttttattacatagaaaaggagcaggaaagcttttgccttttcctgctccttactggtatagtcattaataaaactgaccgccttggctggggtctgtataaccgggatctacataacccgggtccacatagccgggatcttcataatctccgccgccattgctgccaccggtattgtcgccattgccgttgttgtcaccaccgccattgtagtctccgccgccattgccgtcaccgccgttgtagtctccgcctccattgttgtcaccgccgttgtagtctccaccgccgctgtaatcaccgttgttataatcgccgccattgttatagccattgttgtagtcataaccgctattataatcatagccggtgttatagtcatagccgctggtgtaatcataaccgtcatacacgccgctggcatccacagctccggactctaacccgtcctcctgatcctttgtatcaatctgcttattttctgaaatactctgatattttacataggcttctccggtttcatctgtataaaactgcattttactcatgtctgcaagatccaggtttacagtcagatactccgttccattctttcccacaagtttgatatcataaagctccccgccttcttcggatatgggagtataataaaattcagcctgttcatttgcgttgatcatgactccattgagaagatttgttccccaatcttcatctccgctcaccctcaggtaaatttcttttaaatcatttttaattccgttcactaccggaatctgcttggagctggcagtctttgtcccaaccaccttgggtgcaggggtgggggtaggtgccggagtgggtgtcgccgttggaagaggagttggcgatggtatgggcgtagaagtaggcagcagtaaaatgctttcttcctttttaatctctttaatcccgcatcccgctgaaaaaatcattgccgctgaaacaagcagcagccctaatttacttaatttcattttcatgtcctccttaaggtacttcgcttttgttcagcgccctatgtgcatggggtaattgtaatcttatttcgtagttttgtcaactttattggcgtaaaaagcgccgttattggcgaaataacggcgcttttggtatcatttactatttcgtggcctgcttgtcattgccggctcttttccattcttccttatcctcatattttttcataagatcactctcatagggcagctcttccacaaccatagctccggatgtgaccggtttcttggatgcaaaagccattttcagaaaaatcggcgccacaatcgtggtgagtaccaccacaatgaccacaggtccaagaagggctgcagacatgagtcccacagcatttcccttggctgccacgatcagggccacctcaccacgggagatcatgcccacaccaatacgtacgcagtccttattcttatacttgcacattttggctccaagaccgcagcccacaattttcgtaagcatggcaacaatggtaaggatcactgcaaaccatacgatatttgcagacatggaaggcagttccacctgaataccaatgctggcaaaaaagatgggggaaagcaggatataggacaaggtatcgaaacgcttggccacataatccgtctttgtggttttcgtgatgatcagaccagcaaagaatgctcctgtgatatctgcaacgccaaagaattcttcagcagcataggccataagcagacagattacaaaggcaacgataacaaatcttctaagattcccttcgtagtgctgaacccacattttataaatcttgtgaagcagcactcccacaacaccaaccatcaccaaaaagcccacgatcttcagcataacaacgctgatcttaatgctggtatccgccatactggtgatcagggtaagtgcgatgatacccaggatatcatcaatgatggcagcgcccagaatggcattgcctgccttggtgttcagcttgcccatctccttaagtgtctctactgagatacttacagaggttgcggtgaggatcacaccgataaacatgttctgcagaaacagactgcagcttgctgtagaatctatcactccgggacgattaaaaatataagccaccaggaaaccgcccccaagggggatgatcactcccaaaagggcaatgacaaaggatgccttgccacttctcttcaactcatcaatatccgtctccagaccggcacagaacatgaggacgatcacccccacctctgacatctgcttgataaacgctgtctcctggataatattcaacaccgccggtcccataataagaccagccaccagggctcccaccacctggggcatatgaattttcttggaaaacaggccaaaaacctttgttgccaacaaaataagagctaaatccaacaaaaaaccataggaactcatcttctctcctcctctttttttcatgcgcaacaattatatcattaatcgactaaaattacagtgttgatttaaacaaaatatcagttttttcgtctattgattttaggaatattagccatattttccttttgatttagtttttcactttcatgatttcacactttcccttacttaagtacaaaaaaactcgacggttttcacaaaattggttcttattcctcttttgcccagtcaaacgtgcatttcacagcctttttccagccccgcaacagcttgtcccgcttctcctgggtgatctgaggctggaacctgcgcccctccacccagttcttctgcacctccttgcagtctgcccaaaaacctatggccagtcctgccagatagacggctcccagagccgttgtctcaatacagcttggccgcaccacctgggcatttaatagatctgcctggaactgcatcaggaagttgttggcactggcgcctccgtccacccgcagggcattgagatccatctttgcatcctgcttcatggcctggatcacgtcagaaacctgataggccagggattccactgtggcacggataatatgggccttctgagcccctctggtaagacccaggacagcgcctctggcgtactgatcccaataaggagctcccagtccggtaaaggcgggaaccacatacactccgttggtatccggcacactggtgcagtacttttccgattccggcgcgctctttaaaatcttcacttcatccctcagccactgaatggccgctcctgcaacgaaaacgcttccctccagggcataaccgggagagccgtccccgttcacggcaatggtagtcaaaagtccatggctggatttcaccgcctggttccctgtatgcatcagaaggaaacagccggttccatatgtatttttcacatcaccgggctggaagcagcactggccgaacaaggctgactgctgatctccggcagccccggcaatgggaatcctgcctccgatcaccgcctcgctggtatagccgtagacacagctgctgggcttaacctccggaagcatgctagaaggaatctggagccgatccaggatttcttcatcccactgtcttttataaatgtcgaagagcatggttctggacgcgttggtataatcagtcacatggaccgccccctttgtcagcttccagatcagccaggtatccacagttccaaagaggagctcccccttctgtgctctctccctggccccgggcacattgtccagaatccatttaattttcgtgccggagaaataggcatcaggaatgagccccgtgcgttcccctattacctgggcaaaaccatcctgctccagctcccggatcatgggagcggttcttctgcactgccacacaatagccggataaaccggctctcccgtggcggcgtcccacacaatggtggtctctctttggttggtaataccgatggctgcaatatcctctgcatccacactgatctttcccatggcctccataaccacactgagctgggaagaccagatctcattgggatcatgctccacccacccagcctttggataatactgggcaaattcccgctggaccacgctgcacatattgccctgcttgtcaaacaaaatacaccgagagctggttgtcccctgatccaaagccataatatactttttttctcccatggttccttctccttatcttatatgtattttagcaccttgccggcacctggttaacccaaaaagtttttccccaagaaatagcccagcaccagcacgccaagggcgatgcggtaccagccgaacactttaaagtcatgctttttaatgtagcccataaggaatttaatggacaagatggacaccacaaaggccaccactgtgcccaccagcaaaatcgccatctccatggccgtataggcaaatccgaatttcaccattttcaaaaggcttgccccaaacataacagggattgccaggaagaaggtgaattccgctgccaccgtacgggaggtccccaccaaaatccccccgataatggtagcccctgaacgggaagtgccagggatcactgccagcacctgaaacaagccgatgagaaatgcggtcttaaaggaaatctcctccaggctgttatatttagccttgcgcttcttgttataattttcaataatgataaacagaataccatagatgatcagcatcaatgccacaacaaaatagttgttgaatttctcttcaataaaatcattaaatggaagggctatgataatggtaggcagacaggccaccaaaatcttaaaccacaggatccacttctcacggctgcaatagcggaaaattccctgctcactcttcttaatatgaaaaggccacagcttgccccagaacaaaacaaccactgccagaatggccccaagctgtatcaccactaaaaacatctgcataaactcattactcacatgaagcttgataaattcatcggtgaggatcaaatgacccgtgctgctcaccggcagccattcagtgattccctccacgatccccaggaaaacggctttcagcaactcaataatatccataatactcctctctttttatgcgtttttcttttattttatgtacagcaccattataacagactgaacttcattgaacaactgtaagaaacctttgtgcgccaatgcccagctgccagacagctttccctggcacattgtgtgcatccccccggaggttttttattccataggaaagtttagaaaactttcctatggaaaaggagtccggcttgccggactcccgcagaacatcttagaatcttttaattccgtgcactgtgctttcgttttttctgctcatacatcttttggtccgccgcgctgatcaattgtgcagcatcagaataatcccggctgtcaatcactccataactgaaggaaggggttctgggaaatccctgtgtttccttctggttgtcaagaatcccaagaatctcttccatacgatcttctacaaggttggccgggatgttcaaaaagagcagcagaaattcatctcctccatagcgaaacagcatatccttctcactgcggcacacatggcgcagctgccgggatatcatcctgatatagcggtccccctcactatgcccacactggtcattgatctccttgagtccgtccaggtccacgaagcaaatcgttatgggcctcttctggcccagcataccggagatcacatccatggcatactgccggttgtaaaatcctgtgagaggatcctgaattgccttttgcagcaattgaggctctgcctgcctgtggatttccagctcatgttccatattctggtttttctcccgataatccgccaacacacacgtatgccacgtgtagcggatgccgatgaaaaagcccatcatgctaaagagactggattggatgctccatgcctttaaaagcagatcatttgttgatgtggaatagatcagcagattcagaaacaaatataaaaacagaccgataagcagttccagcaaaaatgtgtggcggccatatttcaagatcagcttcagacgctcctgaaactgcggctgaataaaaacctgcatgacagcaccagccagaataaaacccagaagtaccgggaccgctttcaaattctctgtactataaatatgattatcaaaattcttcaatgactctccagtaataatggccagggcgctccggcaaaaaatattgatcgccagaccaaagataattccggttaatgtactgaacaaagcacactgcctgtctccacgggtgtatttcagtgtctcacagaataataaaagagcaaaacaaaaccagttcatgatcaggtgggactgcagagcactcataatcataaaaatcagataattgagagcaaaaaacaaaatgacagaacgaaggttcagatcactcttctgtttttgtctggcaacaaaagtaaaatagctgaaattatagtaaaaataggcccctgccgtcaacagtgtaacaagaatactaacctttgtagacatgggatttcaccaccttgctagcttctcctgctttccttgtcccggtacatcattttgtcggcacagtttaaaagctcaaatgcgctctcctctgtgtttgtgtcaacttctgcaattccgaagctgaaggatggaacctgctggaattgttcctttgctgtctcagagcgcattttctccagcttcgcttctgcattttccttgtcacagtctaagagcagaaccacaaactcatccccgcccactctggcaaagatatcttcctcccgaagctgtctaaggatatatttcgaaaattggatgagatatagatcccctgaggcatgcccctggctgtcattgatctccttcagacggtccaaatccataaacaccagggaaaacctacgtttttcctccagaagaatttccatctgctccatgagataccggcgtgaataaaggcctgtgagggcatctctgtcactcttgtccttcagctctttcgtccttctctcctgctgcagcaatttctgtgccagtacccggtttttctcctcaatatgccgttccataataatagagcgcagatggaacagacagtgtataataaaaaattccttaagcattgctgctcctattaaaagcaagggcagcagcctccaattaatccgcgacatacaaagcagactgtccagaagcagaaaaatattacaaaaccaaaggaatgccataaacggctttttttcttcgctggctgcttgaatgcggaaagttttctgaatctttggccagtctaaaaccagaacatctgccagaaaactgatccccacagccgctgaaattgtcacaatacgccaaaagggctggtgcagcaataaacccatgggaatttcttccacgagagagacaaggccgattaaaatcatatgaagcgccataaacagcggctggacaaagctggccataaaaaatcccctggatctttcactggatttccagcaccagcggacagcacagcatagaaacgcaagcacataaactaccgtcaagtgcatttctgtcatacaccaaaagcaaaacaaaagcagctcaggcagaatatacagaattccccgcagaattgtacattttcttgaatatcccagcgcctgcaatatccgaagggaactatatccccgaaaggcatagagaactgcaggtatgagcagattccatccaatgtatatttccaattctcggttcctcctttccaaacttatgtcaactcaataattaaccctgctgcctgttgatcacacactttcactgtaggatcctatatacgacataattataaaggaagcaatggttttattcaacttaaaataaaggatacattcaagagctgcttctattccagtttaagaacaagccaggtacacaggtacctggctcatccaatttttctttttcattctatacaaagataaatcccacgatcaaataagcaacaaccgccaaggctccgcataccagggcatagggaagctgggtttttacatggtcaatatggtctgccgctgcccctgtggaggaaagtaccgtggtatcagaaagaggtgaacagtgatcaccgaacactccgcctcctgccacggccgcaaagcttgcgatcacaagaacggtaagcttatcccctgtaaagctgaaggccaggggcagggcgatgggcatgcagatggcaaaggttccccaagaggagccggtggcaaaagccataactgcggataccaggaaaataatcgccggaagcaggtggggtgtcaaaagtccctcagtcaggttgataatataatttgctgtgcccatctgggagcttaaggcatttacggaataggccagggccagcagcataactgccggaatcgcacctttcacaccgtctgtcagtgtattcatgacctctttaaagggaattccctgaatcatcatgctgatggtcataaagatcaccaccataaggaaggcttccatggtcttggcagaactgaatgcaatgtaggtaccaatggcaatgctgatgatcatcagaaccgggaagacgaagtttaagaagacccttgtcttgatcccttcgtaagccttcatctctgtgagttcttttccaattaagggagtcgcaccgtcacgcagcaccttgccctcttccatggctcttttttccgcctttttcattggtccgaaatcctttacaatgccggatgccagaagacccacgaacaggacggcaaagatcgggtaaaaattaaatggaatagcctttaaaaacagggccgatgcatccttttctgtggcaatgcagcctacaccaactgccagtcccatcagataagcggcccatcccgtgatgggcataagaacactcacgggtgcagaggtggaatctgcaatataagctaatttttctctggatactttagccttgtcagtaatatttctcataacagagcccacaaacaaagggctgaaggaatcgctgaagtaaataaagattccaaggatccaggccataagctgtgcgcctttccggctcaaattcttttcatggactttctgggaaaatccctggatggctccagtcttttgaaaataagccaccaggatgccgataaaggtatttaagagcataacccaggaaaaactggtggttcccagactttcctttaaaagtgtgggaaatccaaaaagtccctgtcctgccaaaagtgttcctgcaatacaggcggtggccaatgccacgattgtgtttctggtcacaaacgacaatacaattgccaatattgccggtatgacagaaatgatccccattgtttccatctgataagtatccccctttttctttttcttttgccaaaagccttataactttatataattatcggaacgggtaactgtggcaggcggtgcctgatccagcttcctgtcactgatattcagtatctcttccggccggatccacggacggttctggagcgcactggtctcttcatgggtgagataccctttataggtggtaaggctgcgccttaagtatccgtcccttacacatgcctcggccactccattatttaaaatgctgcgaaaatgaggaagaaccgatgctgcataagccactgatgtggaattggcgatggctcccggaatgttgctcacacagtaatgcacaaccccttcctccacataacggggattttcatgggtggtctcatggaatgtctcaagagccccctgctcgtcattgctgatatctacaatcacggatcccggttccatggtccttaccatctctcttgtgatcagatattcggtgtttcccttgggccatttcacgcagtttaataccatatctgtctctggaaggatctgacggatattttctctgttggagatcatagtattaatgttctggcgatactgattctgcagagtccgcagcgttccgatattaatgtccgcaacagtcacccatgcacccagggcatggagaacggaaagtgctgcctgtcccacaacgccgccgcccaggatcaaaatcttcatgccaggcgctgccccaaggccgctgacaaatttcccttttcctccattgatggtgagcatggactcaagccccattaaggcgccctgttttcctgctgcctcacagttgggagacccatatctgtgggaatcctctgctgtaaatgcaatcaccttcttgtcaagaagggcctgtacctcctccggatgtgccgctggatgaatacaggtaaatacgatctgatcttcccgaaggagatcatattccgatgcttcaaattcttttacctttgccacaaaatcacagcttccataaatttcctcagccgtatctaccatgacagctcctgctgctgcatacttttcatcggcaaacccggctttttccccggcacctttctgtaccaggacctcatgtccgtctgccaccagactggcgatttccaccggggtggcgatcactcggttttcacctgttttaatgtcttttaatattcctgccttcatatttctttccttctttttctctgaatattttggacgtaatcctgcgtgtatgcaaatcccacgcttttttattatacataatttaacgctgtaacgcaacaaaaagcagataaatatttgggattggcaggcatattctgaggcttttatgacgatttcagatcggacatggacaaagaccattccttcctgtaccagcctgacctgagagtaataaatactgtgcgtatgggtttttcatttctttggcatttccactatccttgccggatgcaccttagaaaatgaaaaggcagaagcttccttattattaaatcaaggaagtttctgcctgcttttcaatcattcttttcccgtgcccttttcctgcctctggaaaaacagccggtattgccttttatcggttatcaatggtggcaatgtcgatcaaggtgagattgtgaaggtctgtgttctccaggctggtcaccagcgcctctgcggtgtccagggaggtgagaacattcactccggtctcaatggcatttctgcggatcaggaagccatctttttgatgctccacgccctgaggcggtgtgtcaatgaccacgtcgatcttatggcctaagatcaggtccagaagattgggggaaggctgctccagcttgttggtcctggtgaccttaatgccattctccttcaatactctggctgtgcctcttgtggcgaagatcttatacccctgtgcctcaaatcttctggcaatggggataatgtcctgctggtcctcatccttcacagtaatgatcatattcttgtacttgggaaggcggatgcctgcccccaggaatgctttatacagggcctcgttgaaggtctctgcaatacccagacattcaccagtggatttcatctccggtcccagggaaatatctgctccccggatcttctcaaaggagaatacgggcatcttgatggcaatgtgttttgcctctggctgaagtcccggctcatatcccagatcccgcagcttgtagcccaggatcaccttggtggccaaaggtacaataggaattcccgtcaccttgctgatatatggcactgtacggctggaacggggatttacctcaatgacataaacctcttccccgcacacaatgaactgaatattgatcattccaatcacatggagggcttttgccagacggcgggtatactccgcaatggtctcttttgccccttcgctgatggtctgtgctgggtatacagagatactgtctccggagtgaatgccggctctttcaatatgctccatgataccaggaatcaaaatgtcttctccgtcgcagacagcatccacttcaatctccttgcccatgaggtatttatccacaagaatgggatgctcctgggcaatttgattgatgatcccaatatactcttccacgtcctcatcactgacggcaatgcgcatgccctgtcctccaagcacgtaggaggggcgtaccagcaccggatatcccagctcagcggcagccttcttggcctcctgggcggtaaatacggtctgtcccttaggacgggggatctggcactgctccaggattttgtcaaagagctcccggtcctctgccgcatccacgtcctccgcggaggttcccagaatcttcacacccattttgatcagggcggcggtgagcttgatggcggtctgtccgccgaactgaaccactgctccgtcaggcttttcaatatttacaatattttccacatcctcaggtgtgaggggctcaaaatacagcttgtcagcaatatcaaagtccgtgctcaccgtctcgggattgttgtttacaataatggtctcatagccttccttggaaaaagcccaggtacagtgcacggagcagaagtcaaattcaattccctgtccaatgcggatcggaccggagcccagcaccaggaccttcttcttaccctctgtggcaaacgcttcattttccgtgtcctggtctccatacacagaataataataaggcgttgctgccgcaaactcagcggcacaggtatctaccatcttataggcagcggtgatgccgtattctctgcgcagctccttgacttcctcttctgtcttgccgcacagcttcccaatgagatagtccgggaattccatacgttttgcttccagaagaagctctctgtccagctcttttatcttcagctcctgctccagctccaccagaatggcgattttatcaataaaccacaggtcgatctttgtgatctggtgaatggtgtcctgagggattcctcttcgcaccgcctcggcgatcttccagatcctccggtcatccaccaccttcagctcatccaaaagctcttcattgtcaagactggtgaaatcataggacattaagctgtccacatgctgctccaaagagcggatggctttcatcagcgccccttcaaaattatggcagatgctcataacctctccggtggccttcatctgtgtggtcagggtacgcttggctgtaataaatttatcaaagggcaggcggggaatctttaccacgcagtagtccagcatgggctcaaagctggcataggtcttgccagtaatggcgttggggatctcatccaaggtataacccagggcgattttggccgcaaccttggcaatgggatagccagtggccttacttgccagggcggaggaacggctcacacggggatttacttcaatgacacagtactcgaagctctctggatgaagggcatactgcacattacatccgccagtgatccccagctctgtgataatgttcagggcagaggttctcagcatctgatactccttgtcccccagcgtctgggaaggagccaccacaatgctgtctcctgtgtgcacgcccaccgggtcaatattttccatattacatacggtaatacagttcccggcgccgtcacgcataacctcatattcaatttccttccatcctgcaatgcagcgctctacaagcacctctcccacgcgggaaagacgcaggccgttttccaggatctcacggagctcctgttcattttcagcaataccgccgccgcttcccccaagggtataagcgggacgcagaaccaccggatatccaatggtgttggtgaagtccacgccatcctgaaccgtggtcaccaccttggaggctgccacaggctcgccgatcttctccatggtatccttaaattcttgacggtcctccgcctttttgatggtttctgcggtggtaccaatgagacgcacctgatgctccttcaaaaatccgttttcctccagctccatagccaggttcagacctgcctgtccccccagggtgggaagcacgctgtcgggtttttcctttaaaataagctgctctaccacttccacggtaagaggctcaatataaactctgtctgcaatatccttatcggtcataatggtggcaggattggagtttaaaagcactacctccaggccttcctcctttagagaacggcatgcctgggtgcctgcatagtcaaactcagcggcctgtccaatgataatagggccggagccgatgacaagtactttcttaatatcgcggtttcttggcattagttcttccctcccatcatgttcataaagcggtcaaataaataactggaatcctgcggtcccgggcaggcctctggatggaactggaccgtaaaaatactttttccagtgtaggccatgccttcattggtgttgtcgtttacattcacaaaggccggctcggcgatccctttttcctcaagagccttggcatccaccacatatccgtggttctgggaagaaatgtacacacgtcctgtactaagatccttcaccggatggttgccgcctctgtggccgtatttcagcttgtgggtatctccccctgtggccagggccataagctggtgtcccagacagatggcgaagataggcacatcggaatcatacaatttttttatttccttaataatagaggtacattccttgggatctccggggccgttgctgagcatgatcccgtccggctgatccttcaagatctcctctgcacaggtgagggccggataaatggtcacctggcagcctctgtcgttgagggaccgggcaatgttgcgctttgcgccaaaatccatgagcgctaccttgggaccgctgcccttaagcacttctttttccctgcaggtaaccttctccactacttttcctgtgatatattcttttaaacgggggattatagcatttaaatcataattctcgttgacggtaatcattccgttcatggtacccttctcacgcagaatcttagtcaatgctctggtatcaattccggcaatacctggaatgtcatgtttctctaagaaatgctgaatggtgtccacgcttctgaaattgcttgggactctggataactctctcactataaaggcatcgatccatggcttcttggactcctggtcctcgtagcagataccataatttccgattaacgggtatgtcatacataccgcctgtcccgcataggagggatctgtcattacttccagatatccggtcatagaagtattaaacacgatttcgctgataacatcccgtgtggaaccaatgctggtccctgtaaacacatggccgtcttctagtattagaaatgctttcatacaatctccctttctctgtttttctacttagcaaaaggatatttacagcttcaaaatatctccgcttaaaatatcctaaatcttcaagattgtatcacaagatatatgttttttcaacagaatcggctactaaaaataattctgttcctcccaaaatatttctgtataaaaaatacatacttttgcaaaaattatagattctcttttttctgtccacatggcagacttctgccgggcccgggccggttttcttgggcggccttgctttttacatagtatgagcttggaaatggtggttttatacagcagaaaatcccataaatttttctgcggacttagaacttctcctgtccggactaagatctgccggggaatgaggtttttctatttctgcatatttatgcagtttttttgtttctcctgcagatattcctgaagcattttctggggttaggcaggcccttccattttctcctatttataaccatacctccaacaaaaaagagtgtaggcactttgatatcaataggcttacactctttcgggcggtatggttattatcaaattatttgcttgattttatctcatgttctgatacgggtgtactttgtaactcgtggtatgcttttatttcctcttgtcctcttaaaatagcctccagcatttccttccttttcatccatatgatcactcttcccttgtaccgtaccaaggttgcatcatattttacgctgttctactttttagattctctacttctttttcaaggttttctactttccctcttaagatattgacctgtatctcatacaaggttgtcttatcagaaaccctaatcgcctggtttaacttgtctaccaaattcatgtggttttctgccagcaattgtatgtttttgttggtctcgttttccagggacatttttacatctgtaatatcagatttcatatctgtgatatcggatttcatatttgtgatattagatttcatatctgtgatatctgatttcatatttgtgatatctgatttcatatctgccatttcagatttcatatttgtgatatctgatttcatatctgccatttcagatttcatatttgtgatatctgatttcatatctgccatatcagatttcatatttgtgatatctgatttcatatctgccatttcagatttcatatttgtgatatctgatttcatatctgccatatcagatttcatatctgtcatatcagatttcatatctgtgatatctgatttcatatctgtcatatcagatttcatatctgtcatatcagatttcatttcctgctgaccttgctttaaagtagtaacctcattcagtaataggtcaagtttttcatcaattgtcatggaatcaccctcccttacatccttgtgaaatgattgtaccaccttaggcgtataaagtctagcacgaaaagaaacttatatttctgcaagcccccaatagccagttcccccatctgccatacatcccggaagctctgttatctgtacgaagaacaacgggtggaccaaagaactatcccattctcagaaaaaaagagcggaaaccctagaaaatcaatggtttccgcatcttttaaataaatacaaataaatgcaggagatgggacttgaacccacacgatcttgcgaccacaggcacctgaagcctgcgcgtctgccaattccgccactcctgcatttcttatgaagccgtttcttaacgactgcttgactataataacctggaattggaaaaatgtcaatataaaaatcagttttttatgaattttttttatccaaatgcagtatttcccccaatgctctctgcggggaatcttcttatttcccctgtttctttatatgttcctcatatttctttgtaagtcccacaaccactgcaccggaggccagcagaccgatcaggttgggcagaaccataagtccgttgaacatatctgacatatcccataccaggtctaccttcagtacagagcctgtgacaacaaagaggaccaccagaaccgcataaatcttcaccgcattttttccaaaaagataacgtacgttcacctctccaaaataataccagccaatgatggtggtgaaggcaaaaaacagcatgcacacagcgataaatattttcccataggggccaaatgctgcgtcaaaggctgcctgggccagtccggagccggtaagtccggaggacagggcacctgtggagatgatcaccagtgcagtcagtgtaaggatgataaaggtatcaatgaaaacgcccatcatagcaatgatcccctgctcactggggtgatttacctttgccgtggcatgggcatgaggtgtggagcccatacctgcctcattggaaaaaagccctctggccacaccaaaacgcatggccttctgtaccgtaaccccaagcacgcctccagccatagcctggggattaaatgccatgacgaaaatctccttaaaggcaagtgcaaccccgctgccgttcataaataaaatgatcagacagccaatgatatagaacagggccataatgggcaccaccttctcggtcacccaggcaatccttttcactcctccaaggaagatcaaggaggctacaagggcaacgcaaatgccaacgatcagtggatttaccccaaaggcgtttttaaaggaatctccgatggaattggattgtaccatatttcccataaaacccagggccaggataatggccacagagaaaaagcaggtgagaaacttcccgaatttccccttaaaggctgcttttatgtaatataccgggcctcctaccgtcacaccgtccaccacgaccttggtgtgctgtgccagcactgcctctccataaatagtggccattccaaagaatgcagacacccacatccagaaaatggctcctggtcctccagatgcaatggcggtggcagcgccggcgatatttcccgttcctacctgagccgcaatggcagtggtgagggcctgaaaggagctaagcccctctccctgggagccgccgtttaaggaaaagcctccgaacatggctttcattcccgccttaaacttccgaacctggataaacctgagacgtaccgtaaaataaatacctgtagccactaataaaaacatgagaaaataatcccacaaaaacgtgtttacataagccacaatctgacttacgccttccataactgcttccatttcaatttcctctttcctgtgttgtagttgttttcttttgttagatctgcaattccataagcccaaatttcagcctttttagctattttttattgcataggaaggttcccaatgctttcccgtgcaataaaaaaaggctaaagcttcctttaaccccagaaaaaaacgcacagactcctgtctaaactgctgccctgtccttttgcctgagagattcgcatttctgctttcaccttcggcacccaaatgctgggattctccagagtgtcatccaactacagtcccgcacctgacggtgcacctgaaattattaattcttcggtaagtgaacactgttttcctgtagtcttcctatgacgtacttatgtatttgcatgattcattataggaaaacagctctcttttgtcaactatattttgtcctaggagcttgaagctattttaaatataaaatccctgcggaacaagtttctccacagggatccctcttaatgcttatttaattgccttgcgcactattaaacaaaggctccagcacatccgcatacgtttcaaaaattttcagcagatactgattccaatgccgggcatccttttcgctgcttccgaatacataatcctcctgcccgtagtcaatcacatcgaatccaggcgttgccttactggccccggcagtccggtatgcagcagcatctgccagtgtaaaggatactctgttatcttcatcagtggttacccagccgctgatgtccttccctgaggcttcctctgcgttaccgttctccgtctgcgagacagcttctgccttagttactgatacggcattttccacatgctccccgtacatctgatccacatacagggaaaaggaattgcccagcacctctgagggcacatggccgccgtcccactgccattccagttctgcgtcaacgccggcattttgccaggcaatctgcagattcagagaggcaaacatggacatatccccttccgaagcacccataataatcttcgtccaaacaggattttgtgtgccttctgctccgatatattccagtggattgtagagagaaacctggttattcccatatctgtcaccctggctgatttcctctatatccgccttataagcagccaccatctcctcataactctcataatttgaggaatccaccgcgcttgctgccgactgcgtagtgccgctgtccggtgtacctactatctcatttgcatctgtatccttccacatcccgccgtttcttccgcctttttgcccatcggcaccgggcattccgtcttcgggcattccgcctccgggaaagccgccttccaaaccatccggcctttctcctcctccgggcatacccatccccattttaccgccagtgctgcctttcgcataacgtccttccataaaggcccgggctttatctgcggaagtcatccccgccacttcttcattactcagcgcatttccatcctcgtcaaaccaggtccaatcctgtgcatagtccagattatctaaataccactgtagattctgggtaaattccgccagataaaggtcaagatagctgccataatatccgttggtttccggatatttctccagattatattcaatggtaagggctatgttatcctcctggtctccatccttattaaggtcaaacccaacctgggcttcttccacggacaattcctgtgcatttatatattccatatattccgcggacagatactctgcaagctgtgcctgaaacggtgtgttaaaatcataatccgcatccatgtaatactcaaaggccagcgccatgtccgcctcataaagagaagtgatcgcactgtatgcgatacatccccaggcgccgtcagaaatctcgtaatccgcaccgtcaatgctgactgtggttgaatagctgccgtcatcatttttatatacccccactgccccggattcaatctgataatcgtaaaaatcctgattattagaggcagccgcaaacattgccgcatgtgcaccgccgccagagcctccggtagatacaaagtaatccacacttcccggcagatttcccaatagaatattgtatttcacataccgtgccgctgccttctgatcagccaggcacaacggggcatcccccgtataataggtatttccctcttcatccacagccgaatcctgcttgcctctgttgccgcaggaaacattgatataaccctctgacgcataacttgcctgggcaggcgaattattctgggaaccatatcctgccgctcctgtgttaaggattaccggagctgtggcggctgtatatacctgaccgttgctgctggtaaccgccgcctcgtaatcgattaccagagaacccttgaccgcctccccggcctcattggatgttacatccacctctccgtcgccgtcagtatcaattcccgcaacataagcgccgggaacacacacagacacgccctgctggtcggggagctcagggtaagctaccgcagacacaacggacaatgtccaggaatccgtatcggaagaatagttccattcctgcgcctcattgtttgagagattcagcgtctcctcaataaattccttcccctccggctctggggattcctgttccgcatttgcccacgcatacgtaggattcagcagtgacaaagagagcagggtaaccgtcattgtttttatgcacttcattaaaatctacctcctgtaatttataatctctgttacctcatacggaatgagccgtaacactatggtcagattataaaggagaaagattaaagtaatattaaactccagcggaaatcacaaaaagttcacgtttggatatttacggatgacgaaggggaaggtcaccttgtcatccagctcaccctttgccgtcagcatcaggataggtgtctttatcccctttccgcgaacctcccgggcaatctcaaacccggattttcccggcagcatcacatccaggataatcaggtcatataccccgctttccacagtttccgcaccgctgatcccatctgtacacaaatccacctcgtacttttcaaggcgcagcagttccataagagcggccgccatcggcctttcatcctcaatcagcacaatcttcactgaatctacctcccttatcccatacataatctccaggctgatgctggtatcggagtgcctgctatggggtatttccatccggagatttctgtgagaacctccatggcggattaccgaaaagaagaatggctggtcaacataccattgtatgccattaaagaaattgcggatatctgtaaaggatcggcacattactgcgcctatctcaatgctttttgagaacatccctcacttccataagagcgaatcccaacagattctcccccttccagtgagaaatctggaatcgttcctcgtccttcatagacaggccaatcccccatattctgtcccgaactgcgcattcggccaaaatatcatctccggtctccaataatttctcctttaattcctcattctgcccaaacttctccaacagcccctggtaaataataatctggcgtcttccattccaaatcacatcatcgtaatttttcacctgacgtcccaaagctttgatttctcccacatcatggatttttaatatataagcagcggtctgctcatcctgaaacagttttgcctttttatacatcatgtattgttccatggaagaaaattcctgaccgtccacacaaaagcttgacaagtaccagttgctcaaaaaaccatattcttcatctggtttatgaaaaccgattactttacgcatgtgttatttgacctcctaccttctgaattgccaattcaagatccaaatcgtgcagccctctgtagcctgttatgctaataacattatagatttattataaattatccaaccctattatgctatattaatttcatttttttatggacaaacacagagagaaccaatatatttacattgctcccatacactcaatctaaaaacagaccaggattccctcccggtctgttttgtcacacacatatacttccatgcccctttgcactcatttcacacacaaaggcatctccacactacaagtatctcttccccaccgaatcattaatcctcttaatcaactccggctctgctgcaatgtcatgagattgtctagctgagggtctgtttgtgttaaccaagtttcttactcattatctcatacacaagtatgcccccattcatgagatgtatcctgtcatgtctgactgtggcgtatccaagcttctcatacaggctgcaggccggaagagagccgtccagttccacgctgtcatgttccctggcaatctctttttccagttcctttataatgcgggtgccatatcctttcccctgaaactccgggagcacgtaaactctggtgatatggttcccgtcaatgctgccggttcccacaatccggtcatcccgcagcagcacccatacatttcctgccagaatatccggcaggatacgctctttactgtggtacatgcagaaaaactccactacttcctccggataataacaaggatatattttacgtacggttttgtgcacaagatttgtaatctctttcagattcttctcggttgcttttttgaatttgatgagtggttcccctgatggctttccaagggttctcacaacactgtcaattttttccctgaccttccgcacttcaatctttttccattcctccaaaagagggatgaaggcagcgttcctgcttgcacggattttctccaggacatccagcactacctgcctatttacatccttcatttccaacatcattctcatctgtccgtcttttaaatcctggcagaaccgctggtagatttccccggcaaaggtttcctcctcgatagcccatcctttttcagaaaatatgagcataggcagccggtcattgtagtcaatgcgcagaaagtccgcctcaatcatccagtccaccctgtgggaaatctcttccaaggtaagggaatggtaaaaaccataggcgggacattcgtccagatgatgctccagcacctttttgtccttcgagcccttcagaagcttcaccagcatgcttctgccccctgtactgatcaattcgtccgctccccgcagtatcatctttatttcattctcgggcagacttttgatgccgcccgcatctaaggtatattgtactcttggccttcttcccataaagcttattctcctgtctcccttttatcaaatattctacgctcataaacatccgttctcatcatctgcatatactcccgtttccctctttacttgtttatattcctcccgcagcatttcttatacttctttcccgagccgcaggggcagggatcgttgggataaatcttcttttttacatccacaggaaaagacaggatattatcccctgccttccccttattatactctgcattcgtattaagaggtgcggacgcttcccgctccgcctcaggcgatgtgcctaccggcatatttccccgcagcgccaccattctggtatgcttccacaccttcatgactgcctctcttacctttttcttcaaggccttatcgtcatcgaacaagagaaactcctccagcttctccataacgtcatcaacggctgctccgccgcggataatgcactgcacatatttacacagctcatccgcttctgtgtccatttcttcgaaattcatatacagcagagtggacaacgccttcatgtaagagtcaaagggcagatatccctcctttccaagagtctccacttctttttttgtaggcatataaaatggcatgtcgccctgggcctttagcaattctgccagttcctctttgctctgaaagattccgtaaaccagcttttccccatcaaaatagtagttctttttcgtaggtggaatcatttcgcagaaggagtacatggacatttcgtttaccttatttcctgtatgcttcctgtaaatatccagcactctatccatggtacaaacgccatataattccgccgccgcattcaaataatgagaaagttccagcgcctttcttctctcttttctccattcactgccgcagttctccttatacgcctggtaaacctcccggggtacaacaattccccacatatttgctaccccacaatatccaccctccaccagcgaaattacattttcggaatcctcctctgtaggctccagttcctctgacgaatctgaaaacttcttaaggatatctaattcctcatcgtcgagaaaggtaaaatatctgcacatcacatctctgtccagcacttccctggcgagaaactctgccagttgttttttattgtattttgtgtaacctttcaggctatgtaatttcgctatgtctgttaatatagcctttgtatagtgctgataaatatctgtaagctttaccgtgccattatacaaggaagttctgggattcattttcatgaattttttgaattcctcttccatctcacgcagcattgcgtcaaattgctcaagtgtgccgtcaataaaatcgtcctcgtcctgattaaattcgtcaaaatcgtaatcgctaagatatcttgtatctccctgaatgtgccgtaagccctggttcttattccatatatcctcgtaaatctgcacccggttcattggcttgctctttatattggtaagtttgaactttttcaggatgttattaatcctctctaaatcatactcaccggaaaattgctcgtccgcccattctttcatatcctcatactcaggatcgtcaggatttttcagcgtctccagcagttcgtaatagccatagattccaccgcagtcctcatacggcgtatcacccttaaatttcagcaccacaggataggcattctcgtaatcctctattaccttttccaccacacactcatgaacccagtcatccccaaaatcataggtgtaccggaacttcttctccctgtcaaggtaaggttcgatcatggtttgagatgcctcaatcctgtgaatatttccaaaaccataatcatcaaactcctccattatttcctccacgcaaatatggctgccggggaactcaaaagaaaataaatgatatccactccaccccataatctcattcatcacaacgcccaactgggaaaagctcagtccgcccggcacaacaaacctccgccagattggaggatgggaatttttaattgtcatttttatctggtatgctttcatgaaaatctccttttgtacagtttttgagaaaggtacacgtactatttatatgtatatcataatctatcacagcaaaattgtcagtaactataaatgagcaaatgctgaaatttgctcatttatagtcttgtcctgaaggacccatctatattttgcagttttaccacctaaattttttccctgaagacctgtctgccttttcctaccggatccttacggagttaatcaaagccttcgtctcctctgcgtccatggctttctctcctaaagtagtagaaacctgaatttttccctcttcaatgtcctccttcagatcatccactctgtcacgaagctcttggggaatgagatcttcataatggtcatcctccacaagctcaattccaccctcagaaaagcctaaatattctgtaacatcatattccagctctcccttcatgtccttcttgatggcacgcaccagagagcctcccacgtttttcaaggcagaggtagggatatacgctccatagtccggaagaagggcggcctggtcggaatccacaccgaaggcatatctttttgcctgggcggctgcttcgatctggcccagacctgcacttcctgccacattaaagcccacatccactccattttgatactgggtcagcgccatatcctttccggcggcagaatcatagaaattgcccacataggcagttgccacctggatatccgggtccacgtaaagcgctccctgaatatagcctacaaggaaatcgttgatgaccgtattttcctccccgcccaaaaaaccgataattttattggaagggtccacatagggtaaattctcctgggtagtcatcatggccgcaagggctcccaccagataggaaatctcattctgtttatacatcacattataaatatttccattatttcctgcatcatcaaaatcaacctgctggtcaaagtaaatgaacttttggtccgggaaatctctgcttgcttttttcagggcatcctccatataaaaggttcccattatgagcacatcataggtgccgttttcgcagtaatcgtacactgtgggctcccacttggactgatctgcggcggtggctcccatctgctccaccttataagtgaatttttcctctccaagctcctcctgaagggcttgaagccctgcattggctgagtcaaagaaggatttgtcccccagggtgccgttggccagaagcgctgccttgtagggcttatcttctttggactcctgcgccgtctgagtctgtcccttgtccttttttccttcctccccacaggccgaaagtgccagaaccattgtcccgcacagaagtatagccgtgatttttttccgcattttccattcctccattccagatctggatttttcattctattttcatagagttactataaccatccagggagaaatcatccttgaaaatacaaaaattcaaccaagccccaattatatgtaaaaagagcccagtaaaaacccagactctttaagacgaatatctttatgcggaaagtcctctcagataagggatcacccagaggatcaaaagggctccagacaccaccacacccacaaggagagaggcttttacccatttaaaggtattttggatctcatccttgttcttctctgactcaggcataacgaacaaggcggcccttgcggccttttcctccttgctcacctgggtcagggcagatccgatgaccatggcggccacattgcacacaattcccacaatacttgggtccaggtacaccggaagggtaatccccttcaggctggtgtaaagtttcaaaagaaaacatcctaaaagtccgaagagcattccacagaaggctcctgtcctggtcactcgtttgctgaaaatacttgccagtgcaacaggcatccaggagctggctgcaatggctccccccaggaacatgatccagaagatggagggcgggttaaagatcgccagcaccagcaccaaggtgctcacgatgaccatggccacccggcctgccttaatggagcccttgctgtctgaggacatcatgtcattggccaccgaggaaccgatcagggacaggaaggtggttgcagaagagattcccgctgacaaaactccggtgaggagtaccactcccagaaccttgggaagcagattcatggctgcccagatcataacctgagaggaatctcccaggtcgggttttacaatattcaccattactgccgccatacccacaaggaactccagcaaaaagacacccagggctgaaatgggggcggatttgatcaccgtgtgctcattttttgccatgagataacggctggactgccagggtcccaccatacaaacagacatccacacaattccgtaggtcagtccccaggccacgttctcagccccggtattatataagggacctggcttgccgctccaggacagaaggctggacgtggcagaattggaagccaggttctccacagcagggaaccagccgcccaccttgtgtgcaataaccagtgctgccagcacaagggctactgtaaatacacttgccatgatggtgtctgtgatcaggacccctctggaaccagacatcaccgtcaaaatcgtaaatacaatcaatgccagggtgatgcatacattataatttactccagtgacaactgacatgagggttccaatcccctgtatgacagacagcaggtaaacggtcatcatcacaattgccgtgacagccgcaagcaccttcattttttttgaacagaacctttttccgaaaaattcaggaatggtaagtacattgcttcttcttaaatatcgtccgaagaaaatcgctccgataatgtatcccgcagactgcatacctgcgaaaataataatggaagagaatactccgtcataacactgggccgcatcccccataaacattccggtgcttgtataggaggcgatcatagaacctgcaatgagcatgaccggcgcctgcctccccgccacataaaaatcattggcgtttttcacctttctgctcacaacgactccaaccacaagataaaggagcatggagatacacatgccgataaaataaatattcatgattttttattcctctcctttaaatatggtttaaaatctttttttatctgcctatagcccagaatgctggctgccataagccatgctcccaaaaacagcgcaattgcgatttccatacttgtcctcctttgtataaggaactttgattcctattttttcttgactgtcagttcctttaatttctggcggtcaatttttccgttgagattaaagggcatttgttccaagtgtacccgtttgttgggcatcatgtaggcgggaagtctgcttttgagctgctccaccacatcggtgtccttcacggttcctgtataatacataatgatcctggatttctcattgtcgtagagacagcagcaggtttcaataccctccatggaggaaatggccgcctcgatctctcctaattcaatgcgatgccccatatgcttaatctgaaaatccttcctggatatgtacaccagctctccgaattcgttgcgcatggcaaggtctccggtgcggtagatgatctccgggtagcaggtattcagcggattctggacaaatacttcctttgtcttctccaagtcattgtagtagccataggcaaggcccgttccccggacgcacacctctccaatctcagttcccgtgacaagggaattgttctcatccagcaggaaaacatccatatttctgcaggcagtgcccatgggaagcttttctgtattagcaaagctgcggtttacctcataagcagtgcaggtgtcggttacctcggtaggtccatagaaattcacatacctggcattgggatattcctggatccatttattaagctgcttcatgggcatgacctctccgccgaaaaacacatttttcaattccggcagatggggggagccaagggcattaaaggccgccagcagcgtcagtgcagagggtacccagtaaatggtgttgatcttgttctcatacagatattccatgagcatacctgggaaagagaacttttcatggggaatgatatacatagtggaaccatttcgcagagtctcatagatatccagcacagacatactgaagtaaaagggcgtctgattgccgatcacataggtatcatccatctggaatctcctggctgcccactccgtaaaatctaccagggcccgctgggaaatgatcactccctttggcatgcccgttgaaccggaagtaaataaaatatataaaatatctgtgtccaggatattctccgccgtttctttcagcttctgttcatctaggactgtctgctgggcctcttcatataagagaacagcactgtccccggcaaactgcctggccgtgtctttgtgggcttcatcggtgaggatgactgccggccgaagggtttccatgattttttcaattcttgccatgggcatcttcgtgtccagaggcgtataaaaattcccactgcaggctgcgcctaaaaatgcggaaatacactccacactcttatcaaggaaaacggccacaggttttttccagaatcctctgtgaatcagctccattcctatgtgatgggcttctttttgaagctctcgaaatgtgatctgcctgttcttatcaacaaatgcaattttatccggatatttttctgctgactgatccagataatcagtaactaacattgtcatacctgacctcctgctctttttacttcttctatgattttatttgtagtttattgaactgcctggttgttcttatgaaataacgcgcctggaggatcgatccctgttcactgtctgcctggcaatatctttgtagtgatttctcttgaaagggctgttttggtgtccagaatcaatctcggctgtgtaaagatgtttgtttagatgcttttttctggaaaaagcatataagtaccggaattagtatagctgttgaaagcttctgtgtcaaaggaattacaacaaaaaaggacgctatggagcaaaaaagggcaatatctaaaaaaataagtcagaaattcctctggggaccggaatattgggtataaaataccatagaataattcttggttcctttccgtcaatttccgaaataattttgggagtaattccggctaatttggttgcaataatttcacttcagccttccaattattccaattccacttcccaataatttttgcattttttgattattttctattgacatttttttcgtttatgcttataatataaaagtcgtcgcgagatgacagtaagaaatgcaggagtggcggaattggcagacgcgcaggcttcaggtgcctgtggtcgcaagatcgtgtgggttcaagtcccatctcctgcatttgtttatgaaaagcggaaaccattgattttgctggggtttccgctttttttaatttctgagaatgggataatttctttgtccaccttggtccaccccgacatgggaaaactcaaccaaatcatccatactacatcgaatataaaagcataccatgagttacaaaatatactcctatcatagcatgaagaaaaaattaagccaataatttgacaataactataccgccacaaagagtgtaagcctattaatatcaaagtgcctacactcttttttcttggaggtatgtttatgaatagtgatatgaaattcgttgccagttccctggaagaaaaagctttgggtatatagaggacaattcgtctccttttatcttgctctggatgattgattaatgtttatatatctaagttggttcaataatccaatataaagtttcaattctggaaaattcacttctaccgtttttgttgctggtatatgcccaaacagtttccccatatttagctttgggaattcttatatttatcttcccgcttgccggaacagtagctgttgctaaagttcttttgaatgcttttactgtcacttttgcttttggtgttgctgtaacttctaatgttcttgtaggatagcaatatcctattattggtttttttaaagtctttgtttttttcaacgtagatatatcgctgtctcctaccactactttatttatagtctttgttctggccttaccatttttgatatatattttaagctgtgttccctgtttttgctttggtatgctcacagtcataatatgatttccagtatattttgttttccggattaccttgttattactttcaacatatgcgtatgccttaagataagcttggtccgtcttattttcgttttttattgtagttctaatgtgaaaacttgttgtatttgtatcaatagctccatatacctttattgtatcaggaacaggggtgtggattttttttgttgccccggaaacaaaggtaaagtttgccgcacacaaggctacaatgagcataaaagtaatacttttcttcattttctttaacataataacctccttttctacttatgcatttcaataagagatgcgactgtagtatcaataggtataaaaccattgtaagcagttttacctgattcatctcttagtcccataatattaattgccgtagttgcatacccatctgcaaaatttttaactactgctccccgcttgaccctccccatgtatcgccatcatcagttaaccataacggtttattggatatgtttgggaatgtccttatttcaaaatgacaaggagcacgccacattgtggcatttggcagtattttaaatttgtctccaggataaccaagaatataaaatttactattagttaaaatactattatccgttatcaccttataattgataggttttatacctaattaaagtcttcatattccatcgtaacatattgtatacaaatataacgtagtaactaattgcttacatagaaatatttgtataagttgatctaatgaaattgctacaattttcatcttttattcaaggctttcgttttattaaatctactgttattactacaaaattatgcaataattaagtgttttaaatttagttatcactatttatctttaaaatattttactagattttcaaaaattttcaacatacacattatcaaaaaatagttaaaaacaccaaaaatgatatatcctccaataacataatatcctgccaccataaatatagcaccaataaatatgatcaaaacaactaatattgctttaatagttttattttttttcataagcatatactcctttttaataagtaatcaacactatagattgtgatttttagttttaccccactcccccaggctgtttgaaaactaattttgaatggtcagcactatccacttttaatacaaaatgaatcgcaaaaatcactttctgacactaatatgtctttggggattgttttatatttagtgttgtcctccactggtactatgtcaataaaaagtacaaattaaacgtgaacttttttcataagaaatgttattttatacagcttctctctccaacttttccaaatctctgtgatactgtttttcatattcatttggtgaaagatatccacaatgactatggatccttaccgtattgtaaaaggtttctatataatgaaataccattctgtatgcatggctataattcaatatcttgaaacggtttaaccattccctctctatcaaggcatgaaaggattcaatgcaggcattatcccatggatatgccttctttgaaaccttctctgcattccttctgtagccagcagataatcatggcaaacgtcttggatccccctgtctgtatgtataatctgaggattatccacatttcttgttgcttttgcttgtttacggcttctataacccattttgcctccagggtatcgctcaatacccacgctattatctttctggaaaatagatccataatgctcgtcaaatatacaaacccttcaaaagtctataggaaggtaatatcggaacaccataccgcatccggcacttcgggattaaactgctcgtccagaataattttcaatttactgctaagctcagaatctattgttataacagtgtaaggttttatatactgcgcctggatacccagttccctcatgtaattgcctaccgtttttctgatattcccccccttctttgcctaaacactctgtaatctttagtgcgtcatagttttgatgggattcatgatagaggccaagtatccgttccttgagtgtctttttcctccttatacatcctggttaactagatcctatatttttattctcccttctattttttatatatttaagattataacataatactatattaattgatacagacgttttttatgaaactttagtacattttttagtggatattccctgcagcatatatagtactaaccatttgtttcacgagctattgtctaaataacacccccttccatcaaacatgggaaggatcggcttcgcactcttatggcataacatcatcgctgtatcttttgaaaactactacgtgtcctgctggatataagggtacatgatttctcatgccaaaatataggctgcaggataggcgccttttctgaaacattctatggcttcctaaattattacagccgcatgacgaaacgtctggtagattttgttacactacttttccttgaaaccagttgtgaggcaagtgcccgtattatgaaagccatgaatataaaaattagcagaggtacagtaatacgtatgttgttaaaaaggtaccaggcccagcctgaatgagaatgcagcagccatattggcttggatgatgttgcttttaaaaagcgccatgcttatgggactgttattatgggtgaactcacccatatgccggttgccgtgctggtgggacgggatggggcggcactgaagaaatggctggaaaataacagacatgtaaccacagtgatcacagaccgggcatcagcatgcgcgaaagctgtgtaggagatactgccggagtgtatttaggcagctgatcagttccacctgcatcagaatctgctggaagcagttaaaaatatagtaaacgcaacggtgccggaggacataaaaatcccaataggtgatacactatccaccataacagaagaaaatgccgccgttaaacagaaagtaaaaaaatgccagaggctgtggataattcagtagaatatacccccaaaagtgtttagtgtaaaataaaattaccgaaagttgcaaaacaaaaatggagaaagttgcatcgccattttggagaaagttgcaaagcttcgtacatagctcgcaggaacgggcagcgccgatatctggtagctcccaagtatgagccatgaaaagatccattgcagacatcacaattatccgttaaccttatctttgttgtagccaaacaataaagacaaggaggaaaggagatgtcaactacaatggatcagatacatcgtatcagagaaatgttctatcagcaagataaaaacatttcccaaatagcatctgagactgggtttaattggaaaacggtcaaaaagtacgtggatatggaggattttaatactctatcccccgtacccgcatcagaggtggagcacgagtcaaaactcgatcccttcaagcccctgatcaatgagtggctgcaagccgataagcttgccccacggaagcagcggcacacagcaaagcggatctataaacgcctgaaagaagagatagccgattttgactgcagctacaggctcgtggctttgtacgtcaagcagcgcaaagaggaactaaggatcaaaaaatcagatggctatcttccattagttcatcatccgggtgaagcccaggctgatttcggatatgctgatttttacgagaatggaagattacatcatgaggccaaatacctcgtgctaagctttccgtacagcaatggcggttatctgcagctcaactatggtgaaaacatggagtgccttctggaaggaatggcagccatgtttgaataccttggaggcgtacctacagagatctggtttgataacaccaggacaatcgtgaccaaggtgatcaaaggcggaggccggaacgtcacagagcggtttcagcgcttttgcgagcattaccgcatcaagcctgttttcatgaatccaggatccggatgggaaaaaggaaacgtggaaaataaagtcggctatctgcggcgcaatgaattggtccctgttccccgctttcagtctctgaaagaggagaacaagcatcttctcagccggtgttacctggatatggaacgtgagcattacgatgatgacagcggccgtctgatcagcgagcggttcgtggaagacagggcaggactgctcccactgccatctgttccctttgataccgctcagtatacgagtgtccgaacggataaatatggccggtttaccctggatgccggaaagcaccgctattctgcttcacctgcatactgtgaggatacggtaaatctcaggatcacatccgcagaggtctctgttatggatcaggacatgcatgaagttgtccgccataaacgcctttatggagacgataaggagagcatggactggatcccatatcttaagtatatatcccgaaagccgcgctccctcaagaacagcggcatctatgatatgatgccacacagcatgcagttgtatatggacagctgtgagggctccgaacggggccgtatccttaaagtcctcactgagttaacagagcgaagcggctttggcagtgctctgatagcggtcgaggaagccatccggcttcatgcaacagacccggatagcctgaaaagcctataccggcgaacctatgcagatgtaccgttattgccaccgttggaaacggatacggcaatcccatcgcagaaggtcgtcctgtttcggaacgaccttcccagcctggatgctgccctgacgaggggaggtgtttccaatggctgatagagatctggaaagatccattgccgcatgctgcaagcagttacgcttatcttcaaaccttgccgagcaggcaataacactggaaggggggaatgcccaggaatatctgctgaatctgctgacaaatgaaatcaaataccggacaatacgcagacggacaaaatacttcaatgctgccggatttccccgccgttactctgccagtgaattccgtacagatgaaatcgatttcccggaagaagtaagtctgaacagccttttgcaactggagttctaccatgccggaaagaacgtcatcatgtacggaggtacaggaaccgggaagaccatgctgtccattctgattggaatagctgcctgtaaccaggatatccccgttcggttttaccggactgcaggaataatcaacctgttcgcagagagcaaggccaagggcacgctgacacagtttaaaaagaaattgaacagcgccgggatacttattcttgacgagtttggctatgtgccatatgacagaaccgggtcacaactgctctttgattatctctccgaaatacatgagcagaaatccgtgatactgaataccaatctggagttctcacagtgggtcaatgtcctgtatgaccagcgaatgacgacggcactcattggacggctgacgcatcatgtggagttgatccttttccctggtgtgaataaccggctgcgagagtccagtatcaaccagtcaattccaagaatcaacaggcgggaggcagaaaacaatggcgaagcacaataaagttatcaaagagcagactaaaatctatcaagaccttctggaacgatatgaggaaatgagcgatcatctctccggtctgatagaggatcacaaccgcacagaagaagatttacggtatctacaggaattcgtccattatagaaaacttgaggatgatttccggtattttaggaagcatgcgcatgaggaatacgaagaggatatgccttttccttatctcacgctgtaacaattaaataatgatgtctgcaatgcctattcgctgactccaatgcgggtcagcagaggctttgcaactttcgccaatttggagatgcaacattcgccaaaaatgttttgcaactttctccaaaaagtgcttgcaaaaaacaccccaaaagtgtacaattatacaactgtatccttgaatatacggatgccggatacagcaaaaggaaaattgcatgaataatacattgcatctggaatgcaatcacgatgttccttaatggcgattatgaacccctgtaccgcaaaagctacaaggttggataggcagcagcttacgactatagagtatgccgctgttgtacctgtttattgaaaaatatgtaattttattactgaacgaagttactactttaaagcaaagtcagcaggtaatgaaatctgatatcactgatataaaaatgtctctggaaaacgagaccaacaaaaacatacaattgctggcagaaaaccacatgaatttggtgaacaagttaaaccaggcaatcagggtatctaatcagacaaccttatatgagatacaggtcaatatcttaagagggaaaatagaaaaccttaaaaaagaagtcgagaatctgaaaagtagaacagcgtaaaatatgataccaccttgatacagtacaagacagggtggttatatgaatgggaaagtcagtattattgcctaaggacgcatggacttatcccaaaaacttaaccaaatcatccatactacatcgaatataagagcataccatgagttacaaagtatactcctttcatagcatgcggaaaaaatcaagcaaataatttgataataactataccgccacaaagagtgtaagcctattgatatcaaagtgcctacactcttttttcttggaggtatgtttatgaatagtgatatgaaattcgttgccagttccctggaagaaaaaggctgtagggtatatattaaggtgagtgggatgaattgtttttactctcccgaatttaagggcttaacctggaaaataatatatggctctattattaaatgtaaagaactcacttcttacattgtttttactgacatacatccatattgtttctccatatttggctttcggaagcttaaccttcatttttccgcttgttggtacggttcgtgttagcaaggtttttttataggattttattgtcagttttgttttcggctgggctacaatatctaacgttcttgtatcatagtcatacatagcgcccggttgtttcaagccttttgactttttaagagtagatatatcgctgtcccctaccactactttatatatagtttttgtcctgctttttccatttttgatatatatcttaagctgtgttccctgtttttgctttggaatatttacatacataaatgtcccaatatattttcctttcccaatcactttattattgctttcaacatatacatatgctttaagataagctttatctgtgttgtctttatttttgattgttgtgtctacaggaatatttgttgtgtttgtatcaatagctccatacacctttataatatcaggaacaggggtgtggattttttttgttgccccggacacaaatgtaaaatttgccgcacataaagccacagttagtaagaagataatgctcttttttatcttttttaacataataatctccttcgatatgttttatttattactttctattaatgttgctatagttccgttattctttgtatatatagaatacttcccctggagttttgcagctgccaagttttatgtacttgctatagattgttatatacgccatatagctatacgaatcttcatgcatgcctattcgcaactctccccggcgtatcttgttatttacaaacaaacatattttcatggaatttcattcctaaacggtatgtttccaatgacactaattacatctcatttggctgcagaacatcttctttcttatcattgatacgtttcatgctgtcatctctggtgacattaattgttccatttacaatcaaaatttccgctgttccagtattcgcaagccgtggataaaattcttctccttcaaaagcccatatttctgcttgataatcatcttcattgtctttcctgtccactgtaatataattaccattattccacaatccaatctctattccagcgtttttagaatctggtcttgaaagtattttaaaagaaaacatgatctttataggagtatcttccactttccaatttgcttcgttttcgtcagcaaatagtaaatttccgccgggctctaaaatcaatgctggaattttgtatgaaacacctaacgggagtacttgactttccatcaaaggaatcatgccgttaaaagtatggcagttttcaataatacgcacatggtccctgtatccattatttaaatctgtgtctgttacatcctttatagtaatttcagtgcttttttcactcacatattcattaaggttttgtccaaaaactttctcgaaattttctatgttgttttcatctaaaatagccgtgttttcattatcagatttcataggagaagcagatgcaaattcaactactgtcatagaaatgcaaatgcaaattactaaaattaattttttcatgatactcctttctgcttttcagcatatctatatcctgactgattattttgctcattatctacagcgaaaataataataataataataataagcattaactaccttacacctcccactggaaattgcaagggatcttctttccactttcgtcctgatacatctcatatcttgtccacatggaataagtacccgtctgacaatgccatattgtgttcgtaaacatcatcccatgtttccgaatcactataccccgttgcccaaaacaaatatttatcgtttccaacaaaccttccatagttggaaggaaaacgaatcatacaatccttacttaaagagtaaatcctatcctctccattgtcctgccaacacaggaagtctccaaaaaggtttatctcgtaataagataccagatccccctgctgtgctgtttcgattatacgtttctcgccatttcggtaaagaaccagctcatattccaaccgctcatccctgcgttgattcttgaaccgttcagcattggaaaagcctccatatgcgattacatccttatggatacttacagaaaccggctgttcattttcactgattttatgaacctctcccttagagatatcttcataataaacggccgcattttcccctccatcatccttcccaatccaaaccagtcttccatcctccaaatcaggtgaaagggcatccttcttgaggacccgtgtctcttttgatgcaagcctatactcgttcaaaagtaattcttctgtttcaggattccaggaagaccataggatacgctccctgtcaagtcctacttttatatccatggagcttccacttgatgaaggttctgtttcatataaaacagttctttcacaggttcccaaattatataaacaaactctgcctcctccattatcatagggcggcatatattctgaccagacaaggtaatctctgctggcctccatgtcaccgggctgatactgctctgtgaccaggtccaaagcttccaaactacctttctctatgtcatagcacacaatcgcagaattaatatcaggggccacagacacaattccataaattttgtgatcctctgacattgccatgggccaccatcttcggccatcttctaattgtaatatgaaactgttctcttcctttggcaaaatttctgaataatcataggtatcaatgctctctgccaataccacccttgctttttgaaaaaatactcctgtaaatagagcaaaagatataattaatcctgtgaatatcccccgtcttatcgaatcactcctttcctttccataactatggcaaacgttaaataatctcaccaataaaatccccccttctatgaaataaaactaaatatttgcaaaatactgtaatccccccattcttatcttctctttattttttgtaaacgtcctggaaaacaactatgtgcaagaatttgcttgatacacaggctcataggtatttggcaagctatcccgtatatgtaaacaagctggccctaaatcagattatgaatacctacagaatctgccactgatggcttccttcatgtgcataatataaattatagaatctaactaacttaaatgcattttatcatataatgtttttctatgatacggtaataatacacaaatgtttcgccttaattttattatcatttcacaattatatgcacaaaattgtggctcatcgcaaataaatatagacaactcacgaaagacacaattaattttaacaaattatacgcacaaggtaatatcaatgctgatctcaaaagaattagaacttgtgcaaatgttatgggaagccgacatggcatttactctttttcataaatttaattattacaatccccaaccttacatcaatgctttgccatgtatttataggaacggtaaactcttcacagctattgttccttctggacgcatagccggacagttggttccagtccggcttgcttaaaggcttcgcttccatgggttcactaagtgcaccttcctgcagcagtaaaaaaggctcttttaccaggctttccaatgtaatatttgccgtactgaaaacaccagagtactattggctggaaaagccgccctttattccaaaggagagctctatgtgccagaagaatttaaggaatgaaccacagaaaaggggaaaggcttaccctttcccctgacagctatttacctgtattgaaatactcgtacaccacactggaaatctctgcgatttttcctgaggcaaaataagaattctcgctcataacgcataatatataggtgcatttgggactgtacacaatggccatgtcatggtctgaggtgtctgtttcgccggtcttgttggcaaccttcgtgccgtagggaaggcctgcgggaattttccagcggcgctgctgggcaaggagaaggttcagcattttctgggagctgttcttatctacacaggtgccataatatacggactccagcagttttccgcagtcctttacagaggtgtagttgcttttgttcccgctgtaggaaatgtagctgggcatgatactgtggtgaatctctgtttttggatatccatagcttttcaagtagctgttgatggtatccacacctgatgaaaaggtattttcgcctgtctggtagagtaccagcaggttgcaggaatcattgtcgcttaaagtgatcatatagcggctgagatccgttatcagtggagtttcctggacttttccctgccggatctgatcgtagagggaggccagcacgtagggcttcatgagacttgcggcgtagagctggacatcatttatgactatggaatcctggtcatccagctttttcagatagatgctccaggttcctccgtagcttttggtcagggctgtcagccgggatttcaggcctcccagcttggtgcttgtgcgggtgccctttccgtttgatgaaaaggaataggaaaaaccgtcgattttctttttggcgttcaccagacattttccggttgtgtccgtgacataataataggttccttgcacagataccaggccttttttccggaccatttttccatcggttcctgtaaagcagtaatagcccttgtatgtggtgcccttataaaccgtgttcagcttatggattccgggtgtagtgtccatttttccatcggttccaaaataataatagccggaaaattttttatttccgattttcgcatttacgtagcggacgctgccctggggcgccagaaggctcatatcgtcccggtaaaaatagccgtttaaggttttcccattggatgcctttaggttcaggcgcaggaggccgtagccggtctcattgatccttcccacggaattgtaacagtaatagccgttgaagggctttccccagatggacctgtttttcaaataaacgattccatacttctggggaaggctgccatccttggtaaaatagtaatagccggcgtaatactgttttccgttgattttctttctgttcacataacacacaccttgtttggtgcggatgatccccttggcagaaacatagtagatccctttaaatgtttttctgttggccttcttgttggtcaggtcatacagaccattctgggtgacagggttcccggatgaatccctgagataatactccccggaggaggatacataacccacggacagctcctccccggcatggacagacttccctgcacccaatgataaaagaaagattgcagccgccagcagaaaactacgcaggaaaattctctcttctgactttatctccctcatacttactccttccttataacaaaccttgcttccttttacaattggtcccttttctggggcagagctccagatccatgtgtaaaaagaaacatttctatattatgattataagtaaggaggtgagggaggacaagtgtttttttattatttttagttttcccggtggtagttcatatagcgccaggtgcctttctgcccataggtgatctgataaccgttgccgccgccatgctgatggaaggaggggtcatagacgtagatttttccgttcatattaatctcgcaccaaccatggatcagtatatttccatagatatccggcacatagcccatgacaaaatgcacgtcgtagcctaatatcttggccatctgatagaacatagacgccatacagtagcagtttcccacaccttttgtaaagccataggcagcataccattctgccttatccctgcagcttactggtgcgaaaatgtcatggtaatagacaacctgataggaagcgtcaaaggcagcacgcagattccagcccacccggtccagggtttttctggcatgatactgggcggtggtcacaggggtggcaactccgtttttatttatggtgtaccactttccgctgatggactggaggttcttatttttcacaagtacaccgtttcctgcaaagaagtacttttttgaattgatcgtgcgcaggccagtgacccggtatccatttttgtctatgtagtatcttttattgttcacagtgagccagcagttttttctcatgcggccgtttccagggttaaaatagtaaacatgctttttgtaggtgacaaagccgcccaggcggacacctttactattaagataatattgatagctgccgattttccgcattccggtgagcatgatcccgtttgagggattgaaataataatattggtttttgtatttcagccacccagtcttccggcggccctggctgtcaaaatagtattgttttccgctgatcttctgccagccctttagcatgacgccagttcctggcttgaaataataccattgacctgctgttttcagccagccctctgccctggatccatctggacgaaaatagtatcgttttccatcaatggttttccagcctttggcctccactccgctttcaggttcatagtaatgccattttccgttaacctgcacccatccggtaactggtttttctggttcctccggattctctggaacctctggattctctggttcctctggattctccgggtaatccggctcctggggtgtctgggaagcgtctgtatcctgtaaggtctggaacgtgtccggcgccaacgcattctgggaaatctccggcttatacagctcctccgaactctggggagcaccccatacagcagacacggaaaagataacggtggcgatacaggataataaaaatacaatccggctctttttcatattctcacctgccttgatcaccataataatccaccgttgatacagccgtcatttcctccttgggctggctgttctggcacagggacctcataagtatatcctggatccccgtaggagtagtctccataagaataatcttcataagagtaattcccataagaatagtctccagcatagggttcctcatacgtctcctgagcagcctgttcctgggcggcggcctgttcccgggcagcggcctgctccttggctacaatctccagctctgtctcctttgtgttgatctcctccttggttttcttgctggtataaaccagatagggtactccatccagtgcatagaggtctgcctcatctaaatcgtcaaaaggaaaagcatgtaagtttaatattaaattattctccccaaatacaagctgtaaatcataaatctttgtactgctctcccctgcagaagcttcctcaccttccccctcctcttcgctgggatttaagaacaggattctttcctcttcctttaaccacacatcgtcctcctccaggagattttccgaatatttagtatcttctctttcttttactaaaatcttggtgatattcatattggtaagatttttgatcaccggatgacagccctcctgaattttcaggccgtcctccttattcaaaagctgcacttcctgctcttggggctccttagaggctccataaacagcatacacgttcatcatgctcactgcacacaaaatagcaaccaatctcttcttcattctcattctccttttcttatcattataaaacgctgcggaacacagggactttcctgaggatcacatctgtcccataggaaagtaccagcgtcacagccatcatccccaatatcccggcaccacccccatattcaaaaggattgaactttaagtgtttatagatccctcttacatagattaaatgaatcaaataaatcccaaaggaatggtccgcaattttatgacagagcctatccagccaagacagccagcgtttcctgcttcttgtaaacatgatgtaaatccccgctgcctgcagtatcacaaatatagatgaataggaataaagctgctctagaatttcatattggtgtacccagcgcatccatacagccaccgccactccagctgtgcctgctgcaaaaagagccgcccccggccagattttctcaggtccccagtttcgcaggtaccatcccagaaacaggtagaagggataaatggtggagatgggaatataaaatccacattctattccagccatcttcagcatgggaaggatggacaggaacactgccgatattcccagcagatacttcagctctttttgtgaggaagcctgggttagtttcttatagaagggaaggagcagataaattcctgtgagactgtataaataccacagatgggaccaggaccttcctgcaaatacctggtacattccctgtataaattcttctgccttactgtccccactgttaaaaagcagctccagcactgtataaataaaaccaaaaagaaaaatagctcccacaactcttaaaacatacctcttaaataatttctcgtaggttatttttttcttttcatccaggagaaatgctcctgttatcataaaaaagcagggcactgaccacataaaacagttaaacacgcactgtcccgccgccattgcataaagggacagattctgtccatataaaacaagagcggaatacagcacatggataaacacaactccaatacaggcaacggcccgcagatactggtaggcactgattttctcctgatgtctctcttctctttcttctattttcatcccctcctctaggcagcttcctgtgtcagacaccagcccttccccgtccttcgtccatgccggtaagatccaggaccgtttttaattcctccaggacaggcctccagccgatcatgcggctggaatagtaattgtaatcacaaaaccaccggtcagcctcataacagcctgccaaaggtgtaaacattccctgcagctctccctttgccagagaatatatatccctccagcacaaggaattactttcatctcccttcaaacaggcgatcagttttccccagggtgagccaggcagctcctcctgggccagccctgcatctggcagcttaagcctgtagcttttgttgtccaccgtaattctgctgccttgtgtaccccccccctgtttccaggagcatatccttggaaatatccttcaacaaattggacacacaataatattctctcgttccgttctcccatactaccgctctccatggaatctcatacccctttgccgtatttccaatgtaaaagtggtcgtacccattgtacagcttcacatcccagggacttgcaaagccgccggaaggtatgagcacaggcttgtttttcacatacagtgttccaaaacaactcaaacttgtacttagaatttccacttgtattccctcctgcttatttatttttaacctcattaaaaaactccacatctatgccaaaaacacataaacggcgcatttgttctcctaaaataggccgaagctcttcttaatgggataaaaaacgttttattttctatagctaatatttttatagttatagaaatagtagcataaacaaaatcctttttcaataactttcataactaatatttttatagtattgagttattaatctataactaatatttctttataattaagcataataggaacctaaggagggcttgcaaatgaagacactagactttgagaatattggaaaaaaaatccgaactatccggctttccaaagggtttacccaggattatgtggcatctatggctaacgtaaataccagccatatcagcaatatcgaaaacaaccgggtgaaaatttctttgacaactctggtccatatctgcaatgcattggggatcactgtggattatgtactggcagatgaatatacaaacaaaaaagcagccttggacaatgaaattttaaatgagctgacaaaatgtgatgacacaaagaaagaattgatcttaagaattattaaagtattgtaagtttcataagttccattaaaaaaggacctgcctggcaggattccggatttacaccggttagcggttagaaaccagggcctttgtgggcacacaataaaagagtccggatcaaatccggactcttttatttacaaaatattttgattaagtaccgcctttcagggcggtttttctttttgctcaaaaagctttctcagctttcggcctgaccatggactctggaatcagcccttcagtctgcagaccatattccataacccctttgcagagttaaagttatcagggatgatctctgccggtgtgatggtgattccgaaggtgtcctgcagctcgctcacgattgacaggatggcaaaggaatccaggatcccgtcatccacaagtgtctcgcaggcagcataatctgcgtccggctgaatgtcttccaaaatttctattaattcttccacaacatggttctccttcctgtgattttctctcatgtaaatgaggcgcaaggccaggcagaaccttgttctgtgttcaacccctgaccctgtcagtgtgttaccaagtataccataaaatcctgtctccttcaataacaaagcaggcaagccccttcaacttacccctgaagccgcttcaggtgttcacccagcaccttggaataggccctggccccatctccgttcatatggccgtcatagtctgtatagaaattaatcttatgggaaaagtccttataatactccgtgttaaagttcaggtaaggtacctgctgttcctggaagaaatctgcaaagtacttccaggctccctcaaagttctccttgtattgcttcagggtggctcccgggatgggggtggtcactgccacaaactcaatgtggttttccctgcagaaatcaatgagcttttccaggtattccatattttcctgattcacctggccttcctcataaagctttgtcacactcatggtgagcttggaggtatccaccggataccgctggataaacccactgtcatggtactcctgggcctgtccctttaaataagacacatcataatcctggttccacttttgatgaaccgtatccttcagcttcccaagctcatactccagagaatattcataccagggaaagagggtggtccggaagttgcactttgcgatcgcgtctgcaaagtattctgccttagctctggacagggggaattcatggtagaaaagaagataattgtttccttcctccttctctgatacaaaatatcccgggtctacctcgtagatgatcctggtgggattctgcttctctgcaataagtctggcaaggtaataggcatcgatcccatactctcctcccacacagaggttatggcctctgcggcctgtgatctcacctatggtctccgggtcaatgttcatttttccatgggaggtgccaaggaaaatatcctgataatctctggtacacactgcatgaatgtcatttctcataaaggtgcagggatacagcataaaatccaaaactttcagcaaaaggcccaggaccagcaccaccagaacaggccttatgatcttcttaaaactgcgcatatataaaacctcgtgccacggctgtggagccgaaaaatccgattgacagtaacagacagaaataaatcacagcgcacaccaaaatgggaagtctggaaaggcatttccggatttccatgcctctctcctgaagcacacttacaacaaataaaatcacacagcccacacccagaatggccagagcatagggggtaaatgcaagcccctcccgccctgcaggaatggtgagaagctgggccggggcaaagctggtcacagactgcttcatcatggaaaaggcttgtcccaccgtgtccgcccggtcaaaaaacatactgatgtttaccagaaggaaggtgcgcaggatcataaatacccggtaccagccctccttgccggagatatgcatccccttcctccactttttgtaagtatctgtcatgagaccgctgaatgcgatgataattccgttatacaggccgtagactatatatttccaggcagctccgtgccacacgcccaccaggaaaaatacaataatgtttgccacacagatgggaagagtccggccgattttctttccaaacaccttcttggctccctttcccagttttcccatccatctggacagggagatgggatagaacacatagtccttcatccatgtacccagggttatatgccaccggtgccagaaatctgtgatggacacagcgaaaaatggccgcttgaagttctcatccagggtgatgccgaacatggaggcaataccgatgacaacatccattccccctgaaaagtccgcataaagctgcagtgtataaaagagaacgcccaatagggccaggcctgaatactgctggggattgtcaaaaatagcatctgcaaaaacagccgcccagtctgccaggaccatttttttgaaaaagccccacagaatccgctccactcctcgagtgatgttctccagttgaaatctatgaccagcataaagctgctgggccagacggctgtatctgccaatgggcccttggagaatctgagggaaaaaggatacgaacaatgcgtatctcagaggatttttctcagccgtacatcttttccagtacacatccagcatatagccagaggactggaaggtgtaaaaggatattcccaggggaaggagaagctccatcccccttaaattcatatgaaacagggcatttaaattttccactgcaaaatttgtatactttacaatggccagcatgccgaaattaagaagcagtcccaggatcagcaccctcttggcgctttttccccggtcctggtccataagccgctggatccccatgccagccagataagtcaccagggtggaaaacagcaggaacaccacataacgcatccctgcggccagataataaatataactaaaaagcagaaggaccagccattgaatctttctgggcagtacataataaaggatcacacaggctgccacaaacagcagaaatgtattggatactaatgacataataaactctcccctataaacagcaaaaggatatggctcagactctggtgaatctgcgccatattctttccgattatcctgccagacctggaatctgccttagggcctgcaggctttttattgattctaatataccagtccgcctgtcagacaggaatcatctcctccatctgcaggaggcacatattcagagcctccataaggatcggtatagggatccgtgtaatccgtataaggatccgtgtagggttcggtgtagcctccatagggatcggtgtaaggatcagtgtaatccgtatagggttcctcataatactgtccgtcgtcccactgttccgtggttgccgcctcagcctctgctgccgcactctggagaatagccagctccgcttccttggtattcactgcttcctgggtgctcacactgttatatgtaagatatgccactccatccagggcattaagatcaccctctttcatatccccgaaggggaatccatggagctccagcgtcataccgtctgtaaaggtgagaagtacattgtagcctggttccagtaccttctctccctccacctgttcctgctcttcctggggagcaggcgtatagtagaacattctctgctcatttacagtaacgatatctccttctgccagaagattagcagggtaatccacatcctccatctctttcactgacactccggagatttccttgccggtcatatttttcagcttcacctcataggcaccttcggcttttgtcccaatggtcttcaagggtacttcggtaggtgtgggcaccggtgtattgctaggcactggtgtgggtgatacggccggtgtgggtgttacctccggggcatgttcctttttcagcccgcatgcggatgtgagcagggttgttcccatcaggcatacacacagggcagtgagtattttctttttcatcattatcgtttggtcctttcccttattgttggatctaatatctggttccgatcacatatctccaggttcctgaagttccataggtgatcaggtaaccgtttcttccggtctcatgctggaaatccgggtcacaaacataggtggtgccgtctataaccacctcacaccatccgtgagggccatagccgccggatgcaagaggaacagagccctggacataatatacctcataccccaaagccttggccatctggtagaaggtacaagccatgacaaagcagtcgcctcttccattctggaaaccatagattccaaaccagtccattgccgtatatccggaggggatcacatcactgttgctgtaataaggaatgctggctgaccaggtaaaggcggctgacaaagtgcgtccgacctgatccagcttgtcatttgccagaacctgggccacggagatgagcacagccacaccattggcatcaatgttgtagtaattgtttccgatcttatattctttcttgttggttaccagcttgccggtgctcaggaagtaatatttcttgcctccaatggtctgcagtcctgtgacacgggctccggaagcggtcaagaaatatttcccgtccttcagcttcagccagccgttcttacacagcacaccattgtcttctctgtagaagtagtatttgcctccgtaacgtacccatcttccctgggctctggccccagtgctgaagaagtaataatcttttcctccaatggtctttctgcctgtgaccgcagcacctgtcttggggtcaaaataataggtatacttggtgcccttcacccagccggttccccgcacgccattgcttctcagataatattttttgccatccagggaaagcatgcctgtgcgtctggcgcctgttctgggatcaaaatagtagatttttccgctgatggtggtccagccagctgcgcgccgtcccagggtgttaaaatagtagtacttattgtccagcttcatccagccccggcgcattttgcccgtatttggcataaagtagtaatagtaatttcctaccttcttccagccctctgtcataacgcctgtggatggatccagataatatttggctccctggtaattcatccagccggttcttctgcggccgccggaatagagataatatttcttgccctctaaggtaaaccagcctccggttttgggatagctgccatcctcaagacgccaataatagtagccgttgcttctcttcacccagcctggggttatgggcttatagctcttctggcattttccgtcagcgccaaagacatatttcttatcccccacctgaatggttgtgttctttttcagagagccattggcattcaggtaatagatcactccgtctatggtctgcaggccgtcatgtttggaaatatcacccagaacaccttcgtagatggcatctggcacattcttcagaaccccatggaattcctgcacatcttccttagttaaataatattcataccggtccgtctcttcattccacacataaccagaggcgggaactgcccctgttgtgccggttacttccagattccagtaaatggggcttccgtcagccatctcaccgatctcatagatgccggtaatgccgaattccagctctttttcctcatccagggggtcatagcggtgccaggttccatctgcattccagcggaaacgttcctgacacacctgatctgtgccttcggtcacgtaccattccagccaaacgcctgttgtctgttccccttctgtgattaaacgaagggaaaaatctctggtggaggaggtgttttcttcgcccttctcctggatatccaaaacggcttccacatcctcaatttcctgggcctgaaaatcggttatctcctgggccttggaatcctctccaggctcctctttatgaatatcatccgacggagccggcgtttcctgagtgttgtctgtaccctggtccaaaggctcatcctgtcctggttccacaacatccaccactccttggtcctggaaatctccttccggaacctgggaggcagcgccctgatccaggtcccccaggctgctgccagagccactgtcagcagcctggggaatctgctcttcctcctgtaaaggctcttgttctgaaaatatggcagcatctccaaaggaagcctcaccaccttcctctgcaccccatacaggagcaacggaagaaacacttacagccacggttaacagcaatgccaaaacgtttgctcttttcttcactttcattctccttcacttcatgaatacataatctgctctgcggggagaaatccccttgtattgtaagaatataattacggacctattatagcatggtacgcttttccagtaaagtccaacagctcctaatggagacattttttaccggattatataggattccccaggcctgaaggcccggggagagtttaccttatttacgctgtttacggaataaacagatgcttcttatttcaccttaacggtaagatacttggttgtgaaattgctgtatatgttcttgccgctgatctttctgtaaggacgaaccttgtagtagtaggtctttcccttcaccgccttgctgtcaaccatgctcagcacagtgctctttgtggtataacccacacgggttccacccttatttgccttggcattggctgcgctggtaaagcggtatacctgataaccagtagctgccttggaggcattccatttgatggtaaccttgccgccgctggagcttgcttttatggtggtaggcggagccggaactaatgcagccgtcttggcagaggtaaatgcagaaatattttttccatttttgccgtttctgtcataaatggtcacataggcacgaattctgtatttataggatacgccaggtaccaagttctttttgtctgtataagcagctgttacattgatgctgtccaaatcttcacttggaacaccgtatgtaacaatagcggcccatttctttgatacagagtcatatctctgaatctgatagcctgcccggaagttggtcttggtataatgaattttattctgagttccgctgaggttctcaatttttgagaaacccggtgccttaactaacgtcaccttacaggtatccgggtaggtaagtcttgtgggaatatggtccatgtagccggagaaattcaaggtcttcagaccggtatttccttccaggaacagaccggtgcacagcatacccaggctgccgcccttaacagctgtgatcttattgttggctgcatcgatggtgcctgtcatatagccagtattcaaggtgcctgcgatctggttgttggagcagttcagctgtaccagcgggcatctctcataggaagctccggttccggcatactgcttcagagggattggctgagtggtgagcttgttgctgctgatatctgcatactccagataaaccatctcacttggggccttcaaagatgtgagcttattgccggaacagtttaatgtctccagctttgtcagcttactgaaatccaaggtggtcagattgtttcttgggcagataagctctgtggtatttacgaaataattcacaccggtaagattgctgatctttttgtccgctacataaatttcagtaactgcattgatctctgctgtacttaaaataccgtcattgtttgcatcaaaagtggaaacataggttctaaaattagaatccggaaaattggttgtattgatcgttacatctccggcagcctccagctcttctccgtctgcttccagggccagtgcctccacgtcctcctgggtgatctcttccggctcctgggcagaaagctctccggctccggtatcttctgcctgaagtccctcagctgcttcctgaggctcttcctggggtacttcctgagcaacttctgctgctgatacatcatctgcagcaaagtctgctgccagagccggcgctgttcccaacatggacaaggttaaaattccaaccatacccatgcgaaataatttcctatttctcattactctactcctcctattacgaatcgattcctacacgctcatactaccttatttttctaggaatttcaacccattttccttgatttaggcaaaattattaaaagaatattacagaactgtcaattttagccaaaggttctttaagaaaccattgctattttctccaatgtttccataaaatcccctggcagaaggaaaacaggccccggtcacccgggacctgtacaggttcacttctttttctgatccttttccttcccgggaaagaactgggaaagaacaagcaaaaccgctcctgtcatcagaaataagtctgacaaattaaacacaattttagaaagacggcggttcttcacaggaagactcacataatctgtcacataacctttggttcgtctctcatagtaattattcagaccgcctcccaaaagaagggcataagccagcttcagcatcccggagcctttccggaacagctcccgcagaaaatcccagccgatccctgccagcaaaaaggaggacagctccataagtcccggcagcttatccttggcaagtccaaatactgctccttcattgtgacaattccggatgagcagcctccctcccaggaccttctgggtgcttccctgaagcctggtggcattcacatgctccttcagtacataatctgccagaaaaatcattcctgcaatacaaataaatatcattggcttcctccgttcaaggcagtgggccggtatccggcaatctgccccacagtcccttgctctgtgaacctctccctcttattcctgaggtttgtcctctgcagccccatcttcctgtactgcttctgtctccggttcagccgcttcttcgcagcattcctgtccctctgcctgggaatctacttcctcctgggcttccggtacggtctcttccactggttcctgctcctggtcctgggcatcgctgtcctcttcttcctggatatccgggcagggcgctccgcagtaggggcaaaaggatacctcctggctcacggattttccgcagtcaggacacaccttttctcctttcatcctcgcaagctcttccttatagcgattgatcaaatcctcgtgctgtctcacttcctcacacagaacagccagctcctcatccatggtctctccagaggaaaaacgtttgtagatcagattgcccaaatctgcaaataccttgtccacaatcctctcctctgtactgatccggttgcggattttctgagattcatagagcatctctgccctctcactgatctcctttgctgtccttgtgattgtttcacctaatccgtcaaaaaaatctgttccttttgttcccataatctcttacctcctatttttctttccccgcagggcacttgcctgttaccgttcatcggcagtcctgtactggatgcctcatccatttgcgcaggaagcttccagcataggcacctcctggcctctgagcaggatcctggggcctccgctgccgtcaatatattctcttgtgatgatcacctggccgatgctgtcatccttggggatctcatacataatatccagcatgtagtcctccaggatggcccgaagggcacgggctccggttttcttttccatggccttcttggcaatggcctccagggcgccttcctcaaagtccagcttcacctcgtccagggccagaagcttctgatactgctttaatatggcatttttcggctccttcaggattttcaccagcatggactggtccagcccgttcagggtgaaaataatgggcagacggccaatgaactccgggatcatcccaaaagcccggatgtcgtccactgtcaccttctccagaagatgctcgtcatggtcatatttatccttcagatccgccataaatcccacagatgcctgcttgttcagcctttccttaatgatattctccagatccgggaaagcacctccgcagataaaaaggatatttctggtattcacagtggtgagaggaaccatggcattcttactgttggcccccacaggaacctcgatctcacttccttccagaagcttgagcattccctgctgtacagcctcaccgctcacatctctctggttggtgtttttcttcttggcaattttatcaatctcatcaatgaaaataataccatgctcggccttctccacatcattgtctgcggcggccagaagcttggataccacactctcaatatcatctccgatataccccgcctctgttaaagaggtggcgtccgctatggccaggggcacatccagcagcctggccagggttttcaccaggtaggtcttgccgcttccggtgggtccgatcataagcatgttggacttctcgatctcaatctcatccatggtgttggtggcaacccgcttgtaatggttgtacactgccacagacattaccttcttggcatattcctgtccgatcacatattcatccaggcttgccttaattttatgaggagccgggattttcttcagatcgatctccggcttaacgggttcttcttcttttttcttctttttcacctttttgggagccgggttctggttggtaagactgcttagatcaatcatattcacattgggcatgttcatcaggtccatataattcatattcccattgccccagttttgattcatggtgtcaaagcttttctgcatacattctgtgcagatatgtatatcattgggtagctcgatcattttaccagctttactctccggacggcggcagagaaagcagtatttctcatattcctgatcgtcctccttctctgtgacttctccctcaagggtctccttcacggtctcatttttctcctgatcgtctgtcataaaagctcctttcaaaattccctctcaaataatatatctattatatcacatgtttactggggataaaataaagtttttataaaaaagagagaggctgcaccctctgcagcctctgcccaataaagtcatatggtatttatccaaaatagtcaaagaaatcatcaatgctgggcacaccctcttctccagagccctggaactcttccggtgcctggctctgctggctgccctgagagctgctgtctgtggcaagctcagaatctgcttttttacccagcttcacttccagggtctgcttcttgaattctccatcgtcagaacggtagatgtccatctttactgtctctccggcttcataatactgaagcagatccaccagtccggtcttgcccttaacggtctgtccgtccagtgtggcgatcacatcgcctttcttaagtccggctttctctgcagggcttccttctgtgaccgtttccacaaaagcaccctcaggaaggtcatagatctggatcatctcagtagtaagatcaatgaccgtcacacccagataagacgccttctcctctgataccttatccctggtctcccggttcatcaggtcttccaggatgggttttgcggtgccgatgggaatggcatagcccatgccctccaccgcattgtctgcatacttggcagaattgatcccgatgacttctccattcatattcagaagtgcaccgccgctgttcccgggattgatggcagcgtctgtctggatcagagaatcgttggtacttccatcctcagtggagatgctgcggtttaaagcgcttacatatccggaggtgactgactgtccaaaaccaagggcatttccaatggccacaacctgctcacccactacaagctggtcagaatccccaagctgggcaattttaatctggttcttggtctcttctggaatatctgacttgttcacagcaaccactgccaggtcctggtcagaggattcccctttcagctttccggtgactgcattttcaaggtccaggtctccgtttccgcttgctaagttggtggtctcctcttccgcgctgagcacatcgccgcccataaagcatacgctgatggtggtggctcctgtcaccacgtgcttgttggtggcgatcaaaagctcgttgtcattttctcccacaataattccggagccgctgcccgtagtgggatattgctggtaatctccatatccgaagaaacgtccaaagtagctgggaatttcctgcatgctcacagaggtgatggccaccacagaaggcattccaacctccgccacgtccgctacggtattaccagcggatgtacgcacggccgctttcttggaatcgtcatttccctcctgcttcaaagcagcgttttctccctgatccgtaagggcctgagacttggcgatctgggtctgggaggtctcttccttcagaaaacggtcactgaccacattcactccctggaaaaccaagcctgccacaaggccaaagaccactgccatggcaaccgtgatgccaaatttcttgccgtttccattggactgcgtcttcttgcgtggctccttcttaggcgcagcgggattgggatagggcggaagtccgtccctggagttcttggtattatcattcttgggatgggtttgatagtagctgtaatgaggcggttcttccttggttccctggctctgtgcctgctggctctgggcagaactccctgccatagttttttcatcggtaaggggctgatctgcagcaggctttggctctgtaccttcctggggctcctggctcttattttcatccgggcttttcatcacaaaattggtgcccgtaacttcttccttctggggtttctctgaatcctcagtctccccgggctcatatccctgggcaggatccttcctattcaattcatcactcatattactttctcccttctctatgtgtaaagctgtactatcctctttctcatttgttgatatcagtgtaacagggaattgtgtttaaattgtgatggctttttaaaaaatcagtgaatggccctttaattccaataatcccggttcatggtgaattttaaaacaattccttttggcaggttttcatagtgtctgcccgtgagataacccaaatatttaaaaccactctgaaggatcacattgggaatgtcccgctttctctttttttcccacaaatatgacagcgtgcgttttaccatctggatcccctccccctcagagggaattccctgaaaaatctccggatgctgagcctgggatacgcccagatcaaaatttctcttaaactgctgtacacaactataattatgtgaatgatagaccttggcatccccgcagtataatatctgataaccggcctgcaccagcctgcccgcatagatcatatcttcattaaaaatcgtcttctgcacaaaacctcccaggtcctcgtaggttttcctgtcataagccgcacacacattggagcagaaataagttttgatccccagcctgggaaggtcttctttccccttcaccatacctgcggccggatagttgtaggtcctggcgtaggcctctgccagcctgcagttccgcctgggaagctgtctggcataagctgccttcacccgctccttctgaaaggcctgcaccagatgggcaattagctccgtgtcttcgggaatggcatcctgggtcatgaacaccataacatctgccgaggatttggaggccagtctcctcctggtgcctccatggtcgaattccgctttcttaatatgctccaccaaaatctgagggtgcttcttctccagctcctgatcccagaaatcctcctgggtatttataatataaatatgagcaatgggataggtctgcttctccagtcttgtcaaaagaaggtccagctctggtcctggctgatacacaggtatcatcacatcaactgttctcatctgttctctccatatttccatttagccgaaaaaagcaccacccagtaccgcgtacctgatggtgcattttcttttattaaattttctgtcagatctgcccttcctgggcctggaaatcctcaccggaatattctccgccctctgggttcaccacctctgcatcacctccgtcagggggtgtccagggctggtcccctcctccatccggcggtatcactggatccaccgggtcacccggatccactggagtatctaccacaggaggatctaccggggtatctaccacagggggatctactggagtatctactatgggaggttcctcaacaggcggcgtccagggcacttcttctcccccattatcaggaggcagcaccggttccacccagttgtccgctggagcctgtgtaggtgtccaggtatccactataggagtatcctgatagctggtatctggtgtcacctggataccaacggaatcctctttatctaactgctcctgaatattgttcagggccttttcatccacaaccttgccgccttccccgtagccggtgagctcaacaatggttctgcttctgtcttgtactacctgtgatggtgtataggtgtctcccgggaagaggaactgatggagagactttacattgctctcaagagttgcggggatgaccacgcttcccttcaccggcagctcagccattgccatttcctgggggaaaccgatggtatcgtcaatactgtaagacagcatgctcacacccatcttcaaaatctcagacttggagaaagaggtctccacatagggaaatacttcatccatgatctcacccagagtggcgatgctggacttctttgccttgtccaccataagctgaatgactcttctctgacgctccgtccgtccaaaatccagggaagcggtataccggatacggcagtaggaggttgcctgaacaccgtccagatgatacaggcccagctccttggtctcatcctccggtttgggatccggaagctccaaaggcgtataatctgtgtctgtctcctcgcttgtctccacacaatagttgttcaagtgaaccatttcctggtaggtaagaggcacatcaatgccgcccagcatgtccaccgccttgaccatagccgtaaagtccacggtgacatagtcctgaatgttcatatccaggttggtgttcagcatggacagggcctgctggggtcctccgtaggaatacgctgcattacatttctgataggtatcatttccaatatccagaaaagtatccctgtaaacagagaccagctttacatcctttgtatcattgtcaatactggcaatgatgatggtatcgctgttttctcctccggcagactcgtttttgcttctgtggtccagagcaaacagagccacgttggtgtatccggtgagcttaggcgctgactcgttcatctccacctgctccctgtcgaaatcctccgccgagggcgcgctgatcttattcagcttggaattgatctgtgcgtacacaaacaatccgccgatgaaaatcagcagaacgatgatttccacagcaaacaaagccttcctgcttttctttcctggtttagccatttttctttccccttaatcctttacaaatcaatatgcgtttttattgacaaatcctttaaatatggtgaggaacataattttgatatcaaatcccaccgtccaattctcaatgtagtacagatcgtactcaattctctttcggatggaggtattccccctgtatccattcacctgggcccagccggtcagtccggggcgcacctggtgctttaccatgtatctggggatctcttcccggaatttctccacaaaaaagggccgttccggtctgggtcccaccagactcatgtctcccttgagtatattaaaaaactgaggcagctcatctatgctggtatgccgcataaatttgccgatccccgtaactctggggtcgttcttaactgtccatgccttcttctcatcctgttccttctgtatttccatagagcggaacttgtacatccaaaaggtcttattgtgaagtcccacccgttcctgcttgaagatcagcggtcccggtgatgtggccttgatgatgatgcacattaggagcataacaggtgatgtaacgataatacctaaaagcgatcccacaatgtccatcagccgcttcacagcagcataaaatgtattgctcagaggaacataccggatattgatcaccggaagtcccagaatatcttccgtatatggtttcgttggtataatattgttataatcaggaataaactttgtgtgcacccccgatttctcacacattgctacgatttcctccagacggtagtactcactaagtccaagagtgattgcgatttcgtccaggcggttggtgggcagaataaccataagattggcgatccttcccagtaccttgatccctttatattccgttcctgctggtatgttatcgtccaggatccctctgatcaggtaaccccactgggggttctgaagtacacggtcaatatactcctctgccgcgcggctgtaacccaccaggatcatctgcttttggttcagcccccgtttgcgcatatcccgcaggaggtagtagatcagcatcctggcggcccactcaagggacacgttcaggaagaagaagatcgcaatggtacctcgggaaaagtccagctgcttcaccatatacaatgccaggatcatgagaagaacacccagggcattggccttgataatatttgagagcaccagacggcgcccctgcatgcgcataggcgtatacagatcaaaagccttatataaaatcagaaaaaccggaacgatatatgccaatactaacaggtattgtccaaagctcagacccttctcggaagattccgcgaatatccatttaaaacgcatgaaccatgccaataaataagaaacggaaatgacaaaagcatcaatcaacacatggagacgattaaaaagcttatccttatctttaatcaatctttgtcacctctgtcgatttcataccttttactatagcttagttgtccttaaaacgcaataaaatattcccgttaaaaaaataaaaattctgtgaacaatcgactatttattggtaaatctgcgcaaaatattcccccacagctccagttggatttttccgtaagtggaaagatgcttcacggaaaaaggtaccttcctgtcccttctgcacagctggaaaccgtttttaatgcccgcggcatattcccggccaaacccctttaaggtaaaaaacagaagcttcacaacaaatcctgctgccagcagcggcaggttgagcaccacctgaagaaaaggcatatttttgtagatgagatatacattatttctggaggaataacggattttaaactgattgtacctggagccgctggtgccgctgcccacatggtacacctctgctttgggcagataccagttctcataaccgtaaatcctggcccggtagcccgcatctgtatcctccaggtaggcaaaatgttcttcgtcaaagtatccgatcttttcaaaaatctttcttctatagatggccgcacccccgcaggaggcaaaaatcttctcttccctgtcatattgctccatgggtctgtccttgcctctggcaaaggcccagcccaaggcacagtaatagttgcctgcatcgtcaattttgtcccgctgatggtatttcagcattctggcctggcaggaaaaggccctgggatggcggcggatcccctccaccatctgctctacaaagtccttctccacttctgtgtcattgttcagcagcagcacataaggggtgcgggagatcttgatcccctcattcactgcccggcagaagccaaaattgtccggcagttccaccagatgcacccagggataattggctgccgtccacacaccgctgccatctgtagacccgttgtccaccaggatcacgtcaaaatctctgtaggtctgctgttccagcgctcccaggcatccttccaaataagacatcccattaaaattaggaattattactgatacttctgccatgggtcacactcttccctttctctgtttcccctttgccggaaagggacgcagggaatggttccactttgtcagggagagatgcctgttataatagggatctccctttcggagaatctctgtccaatgagaacgcatgtactcaatctcattctggaagcggcgtatcttttctgcgctgtcctccgcccccctggtcttggattccatgtgatacatttccacataagggttgtacaccaccagatagccggcccttctggccttcagacacagatccacgtcattgaaggcaatggccagctcttctgtaaaaccgcctgcctggtcaaaggccttgcgcttcatcatcatacaggcagccgtcaccgcgcttaaatcctgctgaatggaagccttatgaagatagccggtacggtttctcttcatattgacgaacatatgtcccgcaatgcctcccatccccaccacacagcctgcatgctggatagtgtcgtcaggataataaagcttagcgcccacaatgcccacttcctccctctggcagttgcccaagagctcctccatccagtggggattgatgaccgtgatatcattatttaagaaaaggaggtagtctccctttgccgcctgggcggcaaagttgttgatggcagaatagttaaattccttgtcccaggtgatcacccggatattttcttgtttttccagctccttgtaataccggaaaatctctttggttttgctgttattctccacaattaaaatctcataattgtggtaggtggacttttcctgaatggacttcagacaggccgtcagtgactccttttcatctttgttgggaatgatgatggagatcagatcctggttcctgaccggatattccacccggtaaaagcctaaatcctttgtgtggctcacttttccccggaccccctggcgcttcagatgtgcctcaatggctctttttcctgcgtcaaaggcatacatcttactggcaggattgtctgctgtggaggctttatgggttctccagtggtataaaatttcaggtatgtggcccacctctctggcctgctccacacaccggaaaataaaatcatagtcctgggcgccctcaaattcgctgtcaaatccgccaatgctctccataatctctctgcgcactacaaaaaagtggcagatataattgttggaccgcagcagatccaggttaaaatctggcttcaggtgcggctggaagtgctcctccagacctgtcgtcaccttatcctcatcagtatagacggcatctgtgccgggacgtttcactaaataggaggcaatttcgtacagtgcgttgggagccagaagatcatcatggtccagtacacccacaaaatctcctgagaccatggcaaaggcctcgttgatatttccagcgatccccagattctccggaagattcttataccggatccgggaatccttccttgcataataggtgagaaggtccgctacctcctcgttgtctgggcttccattggcaatgcacagctcccagttatcataggtctggtccaaaagggaatccaccatctgtcccagaaacagccggggtgtctcatacgcgggaaccaccacgctgatctttggtttttccttccagttccgcttcttctgtctgtctaaaactgcctgggcgggcttgtactgctcataccagggaccatagggcacctcctctggctcgaagcgttcgtggagacggatccagaactcctttggtccatagtgcttaaaataccgcagtcctttctgaagggtgtagggcgacagcttcttggcaagacgtccccactgaatattcccggaagacgcctggttcttttttttcatatgatatatcctcttttttaatgaattatcttttttcttctatttccatttatttacattccagctaaacgtaaatttattgtaacattatgctatatattttgcaacaaagggaaaacttgtgttataatttaaattgtacctaaccgtttcctgtttacagtgtgtacaggaactgtccaatgattcataataatacggaagcataattatttcaaggagaatcactatgagaaaagcgccaaaattatttgcaggactccttgccatgggattatccatgtcctcattcatgccgtccatggcactggcagcagaagacacacccagcactacgcaaggatcaccccagacaccggatgaatccttacctaatgaatctcaggatggcggggctgcccccgctgctgatgccggctggccccaggggccggagatcacctcccaggccgcagtggtcatggaggattccaccggcaccgtcctttataataaaaacccggacaccccccttcagccaggaagcccggtaaagatcatgaccaccttggtggctctggagaacagcagtctctccgaccaggtgactgtcacccagaccggagcctccggtgtgtccagcgccagcgccaacatcggcctccaggagggtgaggtgatcacagtggaggactgcctctatgccattatgctggcctctgccaatgacgcagcccttcaggtagctgaacaggtgagcggctctgtggacgcctttgtggcaaaaatgaatgcccgggccaaggagctgggctgcacggcaactgtattcagcaatcccaccggactctctgacgaagcccaggtaagtactgccagagacatggccctgatcaccaaggcagccatggacaatgagcagttccgcaccatcgccgctgcagatgtatacaccattgatgccacggactattcagaggccaggaacctgtccaacaactttgcccttcttcagacagacaatgagcagtattatgaaggctgtctgggcggcaaggaaggctatacagaagaatctctcagcacgctggcctgcgctgcttcaaggaacgatcggatgctcatcgccgtcgtgcttcagggggaaaacatccagaccgaggcagaggctgtcactcttttggatcatggcttcagcaatttccaggaggtggagatgacggatcccttgtccacagtatccggggggactgccattctgcccctgaacgtatccaaggacagcgtcactgtccaggaaagtgagaaggcagacggaacccatcaagaattcttctatgccaatgtccctgtgggcagcgcagtggtacaggtcgttcatgagacaaaggaagaggtgaaggttgacggagcgtccaatctccaggccgcagcagacctaacggaaaacaaatccatgactccctattatcttatagctgccgccggagtggtcgtgatggcaggacttttggctcttatgatcaaggtgatcaagtcctaatggaatctatgggaactcttataattttcagctcaacagaaaaaacagcccaggggaccggcctttaccggcctgtctcctgagctgtcttttttttccgtgatccaagtaacagagaaattccatagatgagccaaaagcctgcgcccgccacaaggccctccttgaaatatggggcgtggaaggtgagggaaatgtcatggctgcccttttccacatggcaggccagaaatcccagatctcccttaagcagctcctcttccttgccgtccacagtcaatgtccagccctgctcataggggatcaggaacatggcatatccatcctgggcggcctgaattttcccactgatggcagtatccttctggggggcatttaagatcacctgggaagcatcctgtgcctgtttgctctctttggtcacaaaactgtccaaatcctggattttagagagcctgggggcatcctccaggtagatggcgctgtccagaagagtctgcctggtcttctgggtgcatagctctttcagactgtcttgagacagagctgtggaataaaatctgcccacactggcatccagaacatttttatagaggcagatgcctccgaattttttcacaaactggtagccctcccattttaaatggtcatctctggacagaaggtagcggatgcctgtaaatgcggcgaaccagttgtcctctgcattgtcccagaaggtgtaccggttggtgtctgcataataaagctccggataacaggtatccacaaattcctttacatttccgttcatggtggagttgtaggtactgatcccccggtagccctgggcctgggaatccatggacagggttgcggacatatagtccttctccactctgtagaactccgggtccgtctctttgagatcgttcagagcatcctggatatcctgccggtagagctcccggaagaaatcctgtggtttttttaaagcacccacggcctgctctgctttatttgtggaggaggtttcccgggcatagatctccatggccgttcccatatcctccacaggggtgtcggcttttctaagggccacacggtccttgtaagtgatgcccccttcggagaccacgttcaccaccaaagccccggccagcaggagcatgagaccccttcgcatctccatatttttcagaaggctcattgccgccagggcaaggatcatgatctctccggtaacagccaggatcacggcgtttgtgcggtattgggcaaatacgctgtggctatagccctttttgtaggcctggttcataaacacaaaggcaacaagcagggcaagcatactgatccttcccccgtttttcacatagtcccacatccaggccaggcccagcaccagaatgggcaggaacacataggtatagcggtgggtggggatggtaaaagcattaaataccgttcccccaaagggcaggatcacaatgagaagcatgagcagcgcggctgtgtacaccactgccttcacccttttggaggccttggtcttccagaacacagccagaagctgcaggtttaagatcacagacagggtgctgcagaagaagatgggatcctcatagtaattccagaagcccagatattccttgccacccagtctctgaagattctgcaggttggtggaaaacaggcgggtggccacggtttcatagtatttcccaggatagagggtaaagcattgcttcagccactctcccagggacatggattctgcgtttaacctggcggacacgtttatgatcacgtttgccgtgggcagaaatacagccaggctcatgcccactcccagcaggatctgtccacagcctcccagaaatctttggatcctctgcctgcctgtgagcccctcctgcatgagcacacggaacagcaggtaaaagcccacgcagatcagggacatgtatgtaaaatacacactgtagatcccagacaggaacacggtcaccgggaaccagccccgccccttttcccttcgcagaaacttctctgcgcaaagaagcatgagaggcagatagatcaccgccatgccgaactgataatgctgtccccacaccagcagatagccgttcaggccgtacacaaaggaggccaggaccttgccctgctcactgaaagaaaagcaggagagaaaccaatagaacacaaggccggcagccagcacccgaagaacctggatccacaccagaaacagcagcatgtgggctggtcccagaagcacgcccagggcgtacagaaggagcaaagagggatcaaagagattcagattgaacaaattggtcccgaatccgttggtgaaatcccacagagagaaggttccctcccttaaatgattcacaatggagttataatgcatcacatactgctgccaggtatctccccccacatcgttgtacaccatcaccaggtctccgaaaatgtactcccggaacataaggagacagaccacgaagagggctgccaaaaggaagagctcactttttcttctgggtgtgagatacttttttagcaaaagattgtttctcttttccattcttctctatccctggataacttccaaatagcgtttcagggcatcctgccaggagggcagatgggcaaagcccatttccgtaagtttatccttgctcatgcggctgttgtggggccgtttggccttggcagggaattcctcactggtgacaggaaccacctttaccttcaaccctgcctggcggaaaatctcctgggcaaactcataccaggtgcaaagcccttcattggtggcatgataccggccgtacttgtcggtctccagcatatccaccagaaggcgtgccagatcataggtataggtgggggaacccacctggtcatccacaaccgtgatggtatcatggttctcagccagcttcagcatggtcttgataaagttctttccgtttaccccaaatacccaggcaatgcgcacgataaagtacttctccaggtatttctccacggccagctcaccttcatattttgtctggccatacacattcaggggatgtctctcatcatccggctcccaggggcgggttccctccccgtcaaacacatagtctgtgcttaaataaaccatgggcaggtccagctttttgcacattttggcaatgttctccgtaccctgggcattcaccttcctgcacaggtccacctgatcctccgccgcatccacggctgtccaggcagcgcagtgaaccaccttgtccacatgggccttctccataacagactccacggcatccatgtccgtgatgtccatctcctccacgtccacgcccacaccttcgtatccccgcttggccagttcattcatcacatcatgtccaagctgtccttttacacctgtcactaatactcgcattctttttcctccatcctttctacagacgttttaatgaaaaatcctggcttttcagggtaagattgggattgtagcagggatccccgtcccttaaaatatccggccagcgtttctcaaaaattgcaatttcccggttgaaccttgccaccttctccggggtatcctccaggcctctggacttggattcataatgatacagctccgcataggggttgtatacgatccgatagcccgcccggccaagcttcaggcagaaatcaatatcattgaaggccacctggagcttctctgtcaaaccacccacctcctggaaggcggaggccttcaccagcatacaggcagcggtgacggcgctgtaatcctgggcgcagatgatccggtggcagtatccggtggtgccccttggctggagcacaaagcagtgtcccgcgatcccgccaaagccgatcaccacgccggcatgctggatggtatcatcctcatagtaaagcctggctcccacggcccccacatccggccgcatggcatatcccagcatttcctccagacagtccgggttaatgatctctgtgtcattgttcagaagcagcagatattctcccttggcaaaggaagccccatagttgttgatggccgagtaattaaagggtccttcccaatagaccactctcaccctgggatccgctgcctccagctctttataatactggaaggttttctcttctgtactattattctccacaataagaaactctaaattctgataggtagatttctccacaatggaatccaggcaccgctttagatcctctgtgtggtccttgtttggaatgataatggagatgaggggatcataggcacggatgtacctggtgcggtaaagtcccagaaattctcccaaaaggacctgtgcctggattcccactctctcataatgtgcttcaatggcccgcttccctgcctcaaaggcataggttttgctctcaggattttccgccgtggaatcctcatggcatctccagtggtacaggatcttgggaatgtgatagatctccttctcctgcacagcctccacgcaccggaaaataaagtcatagtcctgggccccgtcgaattcctttcggagcatgcccacctgctggatcaccttgcggctcaccacaaacaaatggcagatataattcactgtccgcagcaaatccgggttaaagtccggcttaaaatgaggctggaagaacttgtgcccgtccatggacattttatcttcatcagaatacagcatctggatccccggatggtcgttcatggccctcacacactggaaaagtgcctctggggtcagctcatcgtcatggtctgcaaaggcgataaaatcccctgaggccttctgaatggcgctgttggtattctctgagatctgcaggggctcctcatggaaaatcacctgaatccgggcatcctggcgggcaaaggtttccagaagcttctttaagggagaatcctctccgcttccgtcagacaggcacagctcccaattggtataggtctgggcctggacagactgaatgagcctgccaagatagttctccggggtgcggtacaagggaaccacaatggagatcttaggctcatagagaaagctggtctttctctgcttgtccagctctgccttagagggcagatgctttaggatccatttctgataggggatctctctggtggacactgtacgtaccttggagaccacctttcctgccagggcggctcctccctgggccttccagtaccggactcccttcttggcatattttccaagcttgttttttatgatcacggccttttgaaggggaacgggatggacagacttggtgtccccgcagtaaaagaccagatacagaagctttccggacacctgaggcacttccacgaaaaagccgcatttctcaggattctccatctcctgatacagagcctccacgtcagcccgggctgttctcaaaacctctgcgtggatcttctctcccttttcatcatagagccggatgcgcacatggccgctggccaccgcccagccccggatccggcaaaagccctgctccaccttctcctcttcaatataaaactggggctttccccttttcttctccagctctgccacagagatggaaaaccagcagattttcttctccggggtgtctgcatagatgaccagcttcttgtacccctccagctcctcgggaagctccacgctggcagtgatccgctctcctaacatctggtccggatccttgaaccgctccatggcgctgacgatctccaccttctcaatggtggtgcgcacggccctctggtccagataagccagcatcctggcctccttgggccaggttccctgaaggatatagagatccgggtctttgagatgaaaccgttctttggttacttcaaaaatttcctttgacatggcaatcctcatttccttagtcttcactcaatgaacagttcccctcctttaaggaaaggttgggactgtaataagggtccaccttggacagctccctggtccacttggtctggaagcgtctcacctctttggcaaaacggtactgcttttccggggtgtcctccaggcctcttgatttggattcatagtggtagagctgggcatagggggtgaataccaccagcttcttcatattccgcaccttcatgcacaggtcaatgtcattgaaggccacctggaagctttcatcaaagcctcctgcctggcaaaagatctccctcttggccatcatgcaggcagccgtcacggcggagatctcctggacactcaccagacgtcccatatatcccgggtcgcttcccagagccctgcacataatatgtcctgcaatgcctcccagaccgatgaccacccctgcatgctggatggtgtcatctgggtagaacagcttggctcccacaagtcccacctgctcctgctggcagatctgaagcatctcctccatccaggagggagtgaggatctccacatcgttgttcaggaacagaaaatattctccctgggcctgctctgccgcaaaattgttgatggaggcatagttgaactcccgggtccaggtgatcacctgcgtgccgggatatttctggggaagggtttcataataggcaaaggtctccttgttctcactgttgttctccacgatcagcacctggaatctggaataggtagacttctcataaatggaggccagacacttctccagatcctgaatgtggtccttgttggggataatgatggagatcaaaggctggcccacaatctgtacatggcttctataccagccaggattgtcagtgcactccacctgggccttgatccccagacggtcatagtgctcctggactgccatccggccagcctcataggcataggtcttgctggcaggatcagcggctgtggaatccatgtggcaccgccagtgatagagcaccttgggcacatggacaatcttctgagccagctcacagcagcgcaggatcaggtcaaaatcctgggctccgtcaaactggctgcgaaagaggccggctttataaagcagctcccgcttcaccaggaaaatatgacagatataattgttctccctgagacggaacagattaaagtccggcttaaagttgggctcaaaataatgctttccatccatgctcaccttgtcctcgtccgtgtacaccacatccacatggggatgcttgttaatggccaaaacaatctcaaagagggcatccggggtgagcacatcgtcatggtcgcagagcaggataaagtctcccttggccagctccacggcggcgttggtattctgggagatcccccggttttcctttaatttcttgtaggtgatgcgcttctccttccggtaatacttcttaagaaattcccggatgtcctccccatcgcttccgtccgccaggcacagctgccagttggtataggtctgggaccggatggaatccatcagctcccggaaaaagtgcaggggggtattgtatagggggatcacaatgctgatcagaggagaatcgggaaacacggtttttctctgtctatgcatttccacacgggtgacacggtgccttgccagccactgctcataatccccggaggcagctccagcctgggaggtgataaattttccgaactccttcaggccgtttttccggatatagtccagatttctgtccttgttttcccaggccagggccttcaccctctgggccatgggggactgctgggcacgaagcttcttcatatcgatcacatggcatttgtccgtgtcctctccccggaagcggaggaccacctttttcccgggaacatccttcatgtccacggttaagcggaaaccgatctcccgggtgcggaagctgtcctcaagctgtctgccttccaccacatccgggcgggctcctctttttaactggcacttaaccggccttccggctgtatcctccaccaggatctcgtcaccgcctctttggttcagcacccagccttctgcacacagggtggtcttgtagaggatctcttccttatccatatggtattcaatgagccggtcctcgcaaaactcccgcagatccatggtcatcatcttccatatggaaaccttctctttctcatggacaaggaacagctccaacatattgtatttatccgtcagctccagaacattgctgatggctgccgtaaagccaggcttggtgatccccgggatcttctccagctcccggaccacatccggtctctcatggcgtctgggagggggaagctctataacggtcttattgtcgcagtacagtacgaaacggtagtcccttcctgccggggccacataccacccttccagaagaagggtatggccgttcctgtcatcgtactgctggtcatccacgctccaaagtattttctccatactgatctatcctcatccttattcatttcctgtttcttgggactggaagctattttccatcccttttcagggtgcggtacagcttccatacctttgtattttccatttcatggatctgctgctcccgctgctttaaggctctgcggagcttctgaagctctctgtccttttcctttagaaagctgtcatagctttcccagaattcctccctggtctccttctctggcataggctggagatgtaccacaagggcactggccctgggcggcacctgatcaataaggatctgagggtctccagcgccaaaatacagcctgccctgccccaagtcatatccattggcagcatattttacctctgtgccgtccttccactttaaggctttcacaagaacaccccctgcggcctctcctggatccagacggatctggctggtacccttagggatggggatctcttggaaaagccctttgtccttcaaagggtaacacacagacaaggactccttgaagccctctccctgattaaagaaaacctgaagctgcctttgggcctgaaaaacacggagctgctcataatagggcagaacctccaccttgccgggagaaatgtcctcatacatggccagcatgggcacatggcttcccagcatatacttctggaagctctcttccatggatctatagatttcctgctccattggggtgatcccggccttttcataaaagcccagctccttcagcccctgccgcttcccatcactctccaaataataatgcagcatgcggtacatgagaaaatgggcaggaatagggaattcaaaggtccattcgtagtcaatgaccgacaccatataatcgcccagtatgagatttcccggcaccagatcaatgttggacacaggagctgccagaagtcccttgggaagcacctgttcaccaaagacctgaataaagccttcggtcacagcgaatgtctcctgagaatggatgcgctccacctttcccagatactcaaagagcagcgtctccagctcctggagccttccctgggccagcagggcatccagccgttcttctaaggtctctccccacagatattccagccgggcttcctcctggccaagggcacaggcattcacctgcaggccctccagctcataggggccctccagcagctttgcgaagcgcttcaagtggcgcacatgggttctggcctggacatctgtgggaagcttttttactacccgctgaccgcccgggtccatgcagatctctgtgcggatggcaaaagctctgtccctctcattggagaacttggcatagatggttctctccgtctccctgggctcctccttggtaagcaggagcaggaaagaattggaaaactgttcaaacagaccattgtccaccagggtatcgtacactgctgactcctggaacaattgcaggcgcaggcggtcaaagttggtctcggtccttcccagctctcccctggcgggaagccgggagggagaatagatggtcatgggaaatttataatccgggaagggatagtaatactgggccttcagatttcccgccgcccttaaaatacaatccagctcctttttgctgaaggtcttcactcccttggtagaaggataaccctccagcccctcaaacaaggtgccgaagtgatcctccgtgcagcctgcccagtactttaagcccagacggttctcaatggccactacaatcttcccatggggcttcaggtgccgggcaatgatcttcagaaaatcttcatagggggcagagctgtcaatgtaagactccccatattcaaaaaccccgatgagggtaatatagtcataggtctgggtgagagttttctcaatatcctgaaagttgcccaccaaaatggtgagattgtccgcctcccggttccgataggcattgatggtgcttctctttttggacagctcaatgcaggtgacctcctttgccctggcgcacagagcgcctgtgacagccccgcagccggagccgatctccagcacctgctcctggcctgtaaagggaagccagcttacaatgttctcccggatatgggaaaaatggtacaaaatgggccagttttttcttgaggcgatcacctggttgtaatcacccgggggattgtccctggcaattgccagcatctggtcctccacagctccgtcgctgtagaaatcttctcctggataacaggtgtaatccagagttacctgtccaatcttttctttcatgcttcctctccacagtggatttccaccactgaattcatgtcataaaagcctaccgtattcttggtagatacaacggtaacgttacaggcatcatagagcctgtgaaatacagtgaaatccccgtccttataccccgtgcacccaaaggacagcagatactccccgccctgaaggtccatgttctgggtaaaggcagcggtgcagatgcttccctgggaggaattttcgatcaaggccttttcatacatggtgttggtgcctgtgatctcagttccctggatatttttgaaggtgtaggcaatgatgggctcctgaatgtcttcatgaaactgtaccttcaccttgatctggaagctgctgcctttttcaatggtgttgctgtaccggcccttggaatccaccaccacaaagtcaatgatctccgcctgtttgttcccatactccaaggtattgggattcacctggaaatgatcatgccagccctcctggaccgccgggagctcctccctggccgggatctcttcctcctggtccgcctgcttcacaggcttttgtcccaccagaagctgcttgtacatatccaccatgtccttgggggagccttcgtccagcttcacccctttgttcaggagaatgacccggtcgcagtatttggagatactgcccagatcatggcttacaaatagaatggtctttccctgtttcttaaattcttcgaatttatgatagcattttgcctggaaaaaaacatctcccacagacaatgcctcgtccaccaccagaatctccggatcaatgttaatggcaacggcaaaagccagccgcacgaacataccgctggaataggtcttcaccggctggtggataaaatccccgatatctgcaaaatccaggatatcgtccagcctctcatcgatctcctctttggaaaatccgatcatggtgccgtttaaataaatgttttcaagtccggaatattccatgttaaaccctgctcccagctccagaagagcggagatccttccgtccacctgaaccactccggaggtgggatttaatacccctgtgatgatcttcaaaatcgtggactttccggagccattggtgccgataatgcccacggtctcgcccttacgcacatcaaaatccacatgatgcagggcatagtgctccttgtaccgcttctgcctggtaagtcccagggattccttaagacggtccatgggcttgtcataaagcttgtacattttactaaggtcctgtatatgaatgactactttttcctcttccacctgtctacctgccttctataatacgtctgcaaagtgcaccttcagtctcttaaacacccagtttccaaacaggaagcacataagggcgaacacccagaaatacaacgtccagccggggctctcccagaaccagcgcttaaacagaaacacatcccggtagccggaaaccacataatacatggggttcagccggagcacctgggcgatgacggggtgggccgtgagcatatcctcagccacccacataatgggagtgagccatacgcccacctgcagaaaaatatttatgatctgggtgagatctcgaaaaaagatcacaatagcgctggtggcatagcacagacccagcaccaggaaaaatacacagcctgtataataaatgatctgcacataataaagatctggaaaccttccgtagcctgtgtacagaaggatggtaaataccacaaagaagcagtgtacaaaaaatgcggaaatgatctttacaatgggcagtacactgatgttaaaaaccacctttttcaccaggtagttgtattccagcagggccgaggtcccgccgtttaatgcatcctggaaaaagaaccagggaatgatgcccgccaccagatacagcacaaagggtacccctatgtttcccgtggtgcttttaaagcccacggagaacacaaaccagtacaccaagatggtgacaatgggctggataaaggcccatacgatccccaggtaggaccctgcgtatttggtcttaaaatcattttttgccagtttcaaaaccagccggcggtttttgataacttccgccggcagggaaaataattgattttgcatttatctgctcctatttctgaaattcccgaaagcttccccatttctggtctttctcagagaatattaattccatgccatccgggatgggccactggatgccaatgtccgggtcattccagattagaccgccctcatcgttggcatgataaaaatccgtacatttataacagaactctgcatggtcagacagaaccagaaatccatgggcaaaatcctttggaatgaagaactgcttcttgttctgtgccgtgagcaccacgccgaaccactttccataggtcttggagcccttgcgcaggtccacggccacgtcaaagacttcgccgctcaccacccgcaccagcttatcctggggatagttgatctggaaatgcaatccccggagaaccccctttttggagctggactggttgtcctgaacaaacacctggtcaattcccgcctctttaaaatcattgtaattataggtttccataaaatagcctcggtcatccccgaacacagtaggttctatgaccttcaggccctcaatgtccccgcactgggttactttgatttttcccattttatttccctcttctcttaattttccattcttctgggcatccctggcacaccatcttcttagagtccctcggacacctcgatcaaatactggccataggcagttttcagaaggggctgtgccagctctaccagctgctccttggtaataaagccccgcttgtaggcaatctcttcaatgcaggaaatataaagtccctgccgcttctggaaggctgccacaaagtcagcggcgtccagaagggaatcgtgatttcccgtatccagccaggcaaagccgcgtcccagcgtctccacctggagggttcccctgcgcagatattcattgttcacgcttgtgatctcaatttctcccctggctgagggcttcacatttttggcgatctccaccacatcgttgtcatagaaatacaagcccggaactgcatagttggatttgggatgctggggcttttcctcaatggacagggccctgccgttttcatcgaactccaccaccccgtactctcttgggtcccggacataatagccgaaaatagtggcgcctttgtccagccgggcggcacgcatgagaaccttagaaaagctctgtccatagaaaatattgtctcccagtaccagggccacgttgtcgtctccaatgaactcctccccgatgataaaggcatccgccagtcctctgggggtctcctggacagcataggacatctgcagtccaagctgttctcctgtgccgaatagctcctggaataccggcagatctctgggagtggaaatgatgaggatctcccggatcccggccagcattaaggtggacatgggatagtagatcatgggcttgtcatagactggcatgatctgcttgctgatggcctttgtcaggggatacagacgggtgcctgagcctcctgctaaaataatacctttcatatacattattctcctttaccttagaatcattcccagcccctggtaaaagcggctgtccctaagggactgacgcctagggctgtccggttgtttttcttatcaaaagcctggaaaggccagaatcttctctacaatataggcggcctccttcatgtccagattatagaacatgggaagtcttaccagccgttcactctccttggtggtgtacacatcctctccatggaagcgtccgaactgctttcctgcaggggaagagtgaaggggtatgtaatgaaacacacagtgcacgccctgctcgtgcatataggcaatgaacttagaacgggtctgaagatccttcagcttcatataatacatgtgggcattgtggcaggcatactccggaacataaggcccctgtacaagaccagccctgcgaagaggctccagcccctcctggtaaaagtgatagatctgacggcgcttttcattaatcttctcgcactcctccaattgggcgtacagataagcggcgttcagctcgctggggagataggaagaaccataccccacccaggtatatttgtcaacctgtccccggaaaaacttgctccggtctgtgcccttttcccggaggatctctgccttctccaggtatttatcctcctgaaacaccaaagcgccgccttcccccatggtataattcttggtctcatggaagctgtaacagccaaagtcgccgatggtgccaagggctctgcctttgtaaaaggcgttcactccctgggcggcgtcctcgatcaccttcaggtgatgcttctgggcaatggccatgatcttgtccatgtcacaggacacacctgcatagtggaccgggacaatggcctttgtcttgtccgttatggcctcctggatcaaatcttcattgatgttcatggtctccggccggatatccacaaacacgatcctggctccccgcagcacaaaggcgtccgccgtggacacaaaggtgtaggagggcatgatcacctcgtccccaggctttatatcactgagataagcggccatctccagggcgtgggtgcaggaggtggtgagcagcactccgtcggcatgaagcttttccttcatccacagggagcatttcttggtgtaggcgccgtccccgcacagcattccccggtccaccgcatcccggatatattccatttcctttccgataaaggccggtctgttaaaatcaatcattttctgaaacttcctttttctctatatttaaggtttccctcaccacatactgaggggtcttgttgatatttaagatcagcttaccaatatattctccaatgatccccagcatgagaaaggcaaatccgaaaaacaccagcagggcacacataatggaggaccagccgatggcaatgcctggatttaacagcttctgcacgatcactgccacagcacccacaaagcctcccactgagaagacaatccccagaaaggtggccagtcgaagggggatcaccgtataatttaaggaggacagcataagggccatgcccttgcggaaggtgtaattggaatggccatactcccgctcatggtgctcaatctccacatttgccatattgtgggtggtgcggaagaataaaatctgcagataggtgttgtacccatcgaacttgatgatctcatcccgcacatattttctgcacacccagaagctgctgatctggatatcctttggccgctccagaagatgccacagcaaaaacttgctcacctttccagtgaagttcttccagggggagaactttctctgcctgtacaccccataaaccacgtcgtacccctcctccagcttctttaacagaagaggaatctggtccggctggtgctgcaggtcatcatccatgcccaggatcaggtctcccttggcatagttcatggctgccaggatggcgttgtgctggccgaaattcttggccaaattcacgccttttacaaatggatattttccggctgctcttgttatggccgcaaaggttttgtccctggagaaatcattcaccaggacaaattcgcactgatagtcctcaagcttatcaaacacgaggaccacctcatccaccagcttttcgatggtcttttcagaattataacagggtactaccacagaaactaacatacagactcctttatttacagcgagaatacaaaaatcccgacaaagatcaggaaaagtcccgctatctttcgtttggtaaatttctctttcaagaataagtatcccatcacagatacaaaaatataacccgcagactccaaaatcggagacatggacaaagggatttcccgaagggccagcatggtcagcagggttgaggcaaaaaacattgcgtaggccgcaataacaggcacatttaaatattcccgcagccagctgctgtgtgccttcccagcctcctttttcaaaagaacctgggacactgaggagacaaacactgaggccagcatggtacacaccgcgatcataaatttactcattttccgtcaccaccagataaattcccacaaaaatgatccctgctcccagaagcatttttggggttatatgttccttataaaagaggacgccccagatcattccccaaaccagccccacaggcttgttggcataagccacagacaggggcaggtatttaaggatctgctgccacacaatggcataaccaaacatgatcaccagaacgatcccataataaaacagccattttccggaaaagaatacctccccggaggccttcttggaggccactgcgcttaaggagctgaacatcaggctcacatgaagggcgaaaaacaccagaggggatacttgttttttattcatggcacaccctcacctggattctggacagtacctgttccagggtccccatacatgcctcaggggtggttcccttgatgatcacctgtccgatacggtctcttccatttgtcataagctgcacccggtcccccggcttcacattaaaggacaggtccaccaagtcatctcccactgtagttccggggatgatctcttttacgatcccttcctcctgtgcctccaaaaggcggaccacattgggtacccggagggccttctctcttgtgaagagctccgctgccggctcacccatggccagacggacgatggcctcataataatttagtccatagtggatccccacctgctcggcaagacccgtggctcctgccctggcggtggcttcaataacataaatctctccatccttctccatcatgtcaaagtccatgggacagttgtctgcctgcaaggcccggacggctccttccacctgctcccggattttctcctcccaggcctctccctggctccagggcacataatgtccaattgggaaggggggatttccctgatgaagctggtttcccacaggaagcagataggccagacggccattttgcaccatggcctccacaccaaacatggtcccctccagaaattcctctacgatacagtagctttccttggtggcggccatggtctggggatagtaatagcaaagctcttctttggtatcacaccggaagattccccggcttcccatctgatccactgccttgatgatcaatggaaaacgcaaggtttcacaggccatttccagatcctttatgttctgaacctgacagaaggcagccgtgagtacgcctgcccgggcaaaagcctgtttcattttatatttattggtacatctgcacacggtctcccaggaggggccgggcagattcagcttggtcactgcgtaaccctggcttctcagtcccacatccatacaacaggtggcgatgccggaaacctgcaggcgctgtgctgcctccagcacgtcctggggttttgtgatatccacataacagctttcgtctgctatggaaaaacccggatagtctccggggatgcttgcagccactgtggcatagcctaattttcgggccgcctcaatcaacggtaccagggaataggaagctcctaaaatcattagttttttcatggttttacgctcactttcggctaaaattataccattgcctggaaagaatctcaatccttttctttttattccctgtccgatatggtatgatagacaagaaagtacacatggaggtggatttttttgaagaaaattgctatattacagtccaattatattccctggaagggctatttcgatatgatccatatggtggatgaatttatcttatatgacgatatgcagtatacccgccgtgactggaggaaccggaacaagatcaagacgccttctggtcttcaatggctgaccattcctgtggataccaagggaaaattctatcagaagatcaatgagacaagagtgaaggaccatgaatggtgtaaggaccattggcgggccatttctttgaattatgcccatgcgccttattttaaggaatattctcaggagatttttcagatttacgagaagtgtgaggaagaggagtatttaagccggatcaattatctgtttctcacccagatctgccggattctgggaatccacacgaagatcacctggtcctcggattacacgctggcagacgggaagacagagcgcctggtggagcttgtgaaggatgcaggcggtacggaatacctgtccgggcctgcggccaaggattatattgtggaccagtgctttgaggacgcagggatcaagcttacctatatggattacagcggatatcccgcctatccccagcagttcggcgggtttgaacactccgtgtccgtgctggatctgatattcaatactgggaaggatgcaccgaaatatatgaaaagcttttcgtaagtgacagaaacagcccgccatccggcgggcttatttacgcagaaactattcttcaaagagggagagacccgaaagttcttcccccgcctgtgggcttcgcaagtttccaccaaacgatcactaaacgcaatatcgcacgaagaccaaaaaagtcaatctgtcttgatgaaacactttaatccgtgaccagcaagaccattaagcctgctatatggttcactatcagtatatgaacaaaaacatagaatatgagtagaatataaaagagaatcctacggcaggtcacattagtgaccttacagttactcttttgtctgatacatatcctggtaatacttctggtaatctccgctggttacgttcttcatccagtcttcattctcaaagaaccactgaatggtcaggcggatgccgtcctcaaattttgtctcgggataccagcccacctcttttttgattttgtcaggggcgatggcatagcggcggtcatggccttttctgtcctccacataggtgatcagatctgtgctcaccagtttctttctgggatccttgtcaggcagcatttcctgaagggtatccagaatgatatggatgatctcaatattctgtttctcattgtggccgccgatgttgtaggtctcaaacaggcgtccctgctcctggaccatatcaatgcccttggcatgatccataacgtaaagccagtcccgcacatttctgccgtctccatatacaggcagcttcttaccctgaagggcattgttgataatgagggggatcagcttctccgggaactgataggggccgtagttgttgctgcagtttgtaatgtttgccggaaaatgataggtatccatgtaggatttcaccagcatgtcagaggatgccttgctggctgaataagggctgtgaggagcatagggagtggtctcatagaaatagcctccgtcctcctccaaggagccgtacacctcgtccgtggacacatgaaggaacttcttgtccggctggaaggtgccgtccggcagttcccaggctgccttggctgcgttgagcatcaccagggttcccagtacattggtcttcacaaagacctccggatccttgatgcttctgtccacatggctttctgcggcaaagtgcaccacccggtcaatgtcattttcctgaaaaatcttctggatcgcctgactgtcacaaatatccgccttcacaaaggtatagttggacctgtcctccacatcctttaggttctccagatttccggcataggtcagcttgtccacattgatgatccgaatctcatccccatacttctgaaacatataatgaatataattggagccgataaatccagctccgccggttaccaaataagttctcatgagttattttctccttttattttcacgattcagcgctccggtgaaagcggttatccgcgatccccttcgctggttctggaaaacagtatagcatcttccccaggttccttcaaggtctgtctctcatttagaatcttccatgagctctgtgtctctaaaaagcccgttgttgggcacgacgctatgctactcctgattaaccttgtggtgcagcaaaatattatttcgtcttgtagtgtccgtcactgtcaaagacataggtgactcctttgctggtaatggtcacgttttctgcccggacggccgacaatgtggaggttccctggcggaaatagaagcgttccccgctaatggtctgccagccccttaaggcatagccgtctccataggcacccccggaagggttgtttacaaagtagaaggtgtaggtcttaccattgatcttcagttccttccagccattgttaaagcgcacgccgttgctcccaaaataatagatatttccgttgagcaccagcttgcggttctcgcagcggtagccatataaaacatggaagtagtaatattttccgccgattctgcgcaggccctttaaggcaaaaccgtttttcatatagtaatatttgttgctatacttcagccagccgttttccttgcggaccccatctgagcctatataacagattttcccattgctgtaccggaacattttgttggtctgcatggctcctgtggtggaatcgaaccgataatagtttccgtcaattttcttccagccgataaccttcacaccattctcataataatacttattcttgccttccgtgacccagccgttcaatgtgctgctgctcccggattggtaggaagctgcaggtgcatatctgggagtgatgatcttagtataatccacatacccaaagtcaatatccacgctgttatacacagggatccccgcgatcagccccctggtactgtagcagtcccgagtgctgttgtctccgtccgtagcctgccagatggtatggcggtactggcttcccagccctgtcatactgtccttgtaggaagccagccagaaatcatagccggtcatctggtccggataataataggtattgtaccaataagtattgctgtacaccatgggataatatccggccttcttaatctcctgacagaatgccttggcaatgttggtcatgacagttctggacagattcgtcacgctgtcatcctccaggtccagcacaaggggataggaaaccttgtagcccttcacctgagagatcaggtacctggcgtccctcaccgcctctgtggtggtccgtgccttactgtaaatataaactcccgcaggaacgccagcaagctgggctccggatatgttattcttataatacttgtcctgctgatatccgtatttattgtttgcccgctgtccataaccagcccggataaatgcaaaatcaatgccggaggatttcaccttgctccaggtaatatctccctgccattcagacacatctacgccccaggtgatggctcccgggattaccttgcccaccccgttgtagcattttccattcaccttcctccagttcttcgctgtggctcttgacataatactgtcctgagtctttgactcaaatccatcggtaaacagcgaggacagggaggaagcctttacctcccgggcctctcctgccgctgccgccagcatgagcaaaaaaatacctgtccacagcgtcaaaacctttttcaatgcttttttcattctttaactccttaattcccttgtaaaacctatcgctgcctgtcccccctggagaactttcctgtgcaagaacaaaatcccccataagctttgcttaaggaggattctgcatttatcaatttaccataccggtccgctcagcttgttctccggtacattccaatcggttggatcgtaattctggttttccggaatccaccagcgcttggaaagtcccaggggcagcggctcatcgtcataaatcttgatctggcttccgttgcagtgggaatatacccaatagcagtcagaaacattcatacgcacacagccgtgtgactgggcagttctcagcatacagaaatcccatctgtacagtgtatagggattcatctgggtattgggaacggaatggatgaaataaccgccgaaaatatgcagtgcccattgtccccaggagggtcccatcagctctgtccatctctggcccgtgctggtcaccgtgtatggacctgtaggcgtgggtgtctctggttttcctactgatacagagaagcaccgaactggtgtcttccagtctgccgtatagatggtcataacattctgagaacggttcagactgatggcatatctggtgctggagttggcaaagccgggaagtttatccagactcctgtgaatgcttccgtcacctgtgaaatagaaattcagtccgtcaatggtctgccagcagttcttatagtactctccgttttccggattgatataatagctcttctgggaactatctgcctgggttacccggatccagccagtcttccaaaccccggtgccgtccagacggccccacacgccgtttttcttcatagccttatttttcacggcagcgttgttgcttccaaagtagtaccaggagcttccgatcttcttccatccggtgatgagtacgcctgtggaatcattggcatagtataccacctggcctgcagcgtttttgataacgcctttcttcatctggccgttcttcttggtcttggtaggaggattaaagtaataatactttccctgatacagggtcctgcctcctgcaagcgctccggttgtcttaaagtagtacttgtatcccagagtactggtgttcattctgtcaatgtaatgtctgccgttgctggggaagtaataccagccgtaccacttattgttcacagtgatggactgccatccagtcttcttcacaatggaaccatccttggcaaaatagtagaaccggttggaatcgcagggcaccttatgccactgattcttccatgcaatataaccggatttggagaagtaatatctctttccgctgatggtgacgatcttatccttcaccattctgccgtcccctgcaaagtaataggtttttccgctgatattacgcttctggttggtaaccgcccggccattggaggctacgtaataataatagccgtctgaagccttgcgcagggcattcatgtacatataaccccccggtgagagaaggtaaatagcagatgcagagatggtgggatctaagctggcatccagcttggtagcagtgatgcccttgggaattgtgaacctgccgttttcgtcaaagtaacgccaccaaaccttggcgccttccttctcagtggcccatccgtttctcaccataagaccagggatctcactgtcttttctaaagtagtaatagcctttgtccaaaagtctccggtatccagtctgtggaatccccttgctgtccagacaatagtattggtctttggctgtctgcacatatccattgtaggtgtccaggcctgccgtgtattcgtcaatcgtaagctcacgcccattggatgcctcataataatggaaggctttgccatcccagttccagtaatccttctggagctgtcccagggtgctggtggcaggatgggcattggcagcttttaaggatagggtatccatgaagaaataagctgcctccttggcataaccaaagcctggtgtgcctgccgggattgttttcgctcccacggtcataatgcctttttcatcaaagtaataatagcctggggtgttgtttcctgtctttatgtatacaagcccgtctgctgaggtaaataaaccgcttacccctgcttccatggcatctggttcctgggtgatctccgtggcctgtccgttttccggtgtgggagtctcgtcctggccttcctgcggattctgcatatcttgtggagcttcatcggcatctggctcctggccgggatctgcttccggttcctgaccagcttcgtaactgggatctgtttccggttcctgcatcagccctgactcctggggttcctgcaaagctggaacctccccttcctgagacaccggctgaggctctaatgaaacagccacatttacaggctgctccggcacatctgcctcaccaaagcctgaaagatcttcagcgccttccaaggtaacgccatccgaagcagcgccttcttggtctacattctgcccgaagatttcctctgcctgaatccccggctcctgctcttccttttctccaagattctcagcacctttgacccctgtcttttttaatgagaaagtaccgtccgaattcttgatccaagaatctactgttacctgaatgggtgtctcgccggactccaggctctccccttcctgttccacatccacgatctctgctgccgaaggtaactctcccgaaatgtccccgggctccggagcaggctcctgtatgttgtccacaatggcagcatcggaaaattcatcctgaatatcagtgatattccccggttctgtctccccatcggtgatttccgggagctggtccgtctccggttcggtgacgatatccggcgtgtccatgacaaagcctgtattgtccgtctcctcagccggctgctcctgaaaattaatttcctgggttactccctctgcactgatctctgatgcctgaatggacgggatcatcgtaaatcccatagtcagacacagaagcagtgctacaacctttttcttcaatgtgatcctccttaaattatttattcccctaaacctgcttcaataatacctgccatggagtccatcgcttcttgttcatctgaaccctcacagatgagtacgatctcgtccccgcattttacacaggcccccaacacacttaatacactttttgcattggccgtgcctccgttaaaatcaaatgtgattaatgatttaaacttcatggcctccttgcacagaatcccggcaggtcttaaatgcagccctgttggattcttaatggttaccttctgtctgatcattgccaaaaccccctattcctttttttcttccgtctcttgtatctccgtaagcttcacctgtgtggtgaccttagaaaccagctcgtaccctttcggaagcttcacagttaatggtatttcataagtaccttcttccatatctgacagatcaacagaaaccttgatctgtttttcattaagatcttccatatttccgtcctcactggaaatacgcagttctacattctctgtctcaaaaactgcttccagcttatctggaatgttgttgaccttaatatcaccggtggatatcatgtaggattcacttccctcaggaagaatgctgaccttcacgatcactttgttgttggtgtctgcggccagccgcatattatccttatccggcagaagctctgccagatccacctgtctttcacaatcctggctttctccggtgatgtccacctgactggcaggtacccacagggtatttccctgctcctccaaagccgccagcgcctcatctgttcctgtaacgctgactgtacttggcgtcagagtcagctttcctactttatacccttctgcaggatagccgctgtattctgcctgaatggccacatcggctttcaccttccacagcttcacagaaacatttacctttggcgttgccagatcgatatatttcaaatacttcatttgactgtcagtcagcttatcctgattcttatccaccacggtgagctccacaggctctgacacattgtccactctgccgctcatattcacctctgccacaaccttgtcaatcttctgcatgagagatttgggagcagtgactaccaccttctcaggattggccgtcttggtgccgatctcatagcccttgcctggctttcctgtagtggacacagagatcaagaattcctgcgtctgtttgtcgtccagggtaatgctgatattctgaggcttggccgtcagattctcggaagcgatccccctgcaggacaaagtgatgggaaccatcacaggattggtatccagactcactgcctggcgaagatccgccactgccgtaatatccgatgacttgatcctctccaccgtcttccttcttccagtcacatagactctggtggtctcctgtccgtcctcgaacaggcacatcttccccccgctttccacataagcttcattctgggtggtgaccggtacatcaaaggatacccggatggtgggattatccacattcaccacgatcagccaaataaagacagcaaccactatggacattaatttctggggaagattattagtgattttttttctcattaagcttcatccttcccttccacaattgctgaagccgcttccctgtatccaccgtagtcttattctgggctctctccaggatatcccggagggcggagccggatacattccgcgtaagcttaccgtcagcagctacggacacctgtccggtttcctcagacacaatgatggtcacagagtccgtaacctcgctgatccccacacctgcccggtgcctggttcccagctgcttgctcagctccatattatctgacagaggcaggtaacaggtagctgccgtgatccggtttccccggacgatcacagcaccgtcatgaagaggggtgttgtgttcgaatatgttgatcagaagctgactgctgatctgtgcatctaccacaatgcctgtcttttcatattctgtaagacgcacattctgttcgatgacgatcaaagctcctgttttcacctcgcccatatcaaaacaggctctcacaatctcattggcggttttgtcactgaagcgctcctccacctcacggcctgtgtcaaatggtatgatggaactcatgaacttcttctgtcccagctgctccagagcctttcgcagctctggctggaaaactaccagcacagccgtgatcattaccgttgccagatttttcgcgatccacaggatggtgttcatctggaagatataggccagaagaataaatgcgagaaccaccagaatgcccttgagaagggtataggctctcgtatatttgatccatacgataaactggtatacgaaaaaggaaataagcagtatttcaatcacatcaatggttcccacatggggcggggcaagctttgtataatactgcataaaaatttttcccagattttccatgacccctctcctttctgaatatttaaaccttctttgaatcctttccttacaggtccttcagagattcctccagctttttctcaaaatcctccggattcatggaggtatcttctgctaccggcgctaccggctcctcgatggcgatctcacttgcgttcctgccggtttcctctcttccgctttcaaagatgggattggcgtaggaaggctttaccacctctacatccttcttatcctcttccggagcaggctccgcgttgatcttcttgatgcttctgtcagaggtgggaacactggacttgggaacagccttcacataataatagtattcatcatcctcatattgaagacgctcggtccttgtgtaatctcctccgaatacaaagaactccagcacaatgccgattataatcgagatcaccgtgctcaccagaagctctaccatatccacattggcattgaggaaaagaccgccgcccagcataatgaatacataggtgacaccgcctgcgataatggcgatcctccatgcatagtcaaaggctctggtgcggataatatttaccagcaggatcactgccacaactgcgatcaatgacagccacatctcctgattgttgatcagtccgtcggagatggtcttgatcctggtgatcatctctgcatctccctgggctgcattctgcagtacaccagcctgctcgttaataaatttaatgaaataatacaggatcacaccgcagccggcaggcatacaagaaagggcatctcccagaagtccgcttcccacagacagcagggctggcgcccgaagaccgaaggccacaggtgtaaagaccagcaccagattgctctttgcgctgaaccgaagaaacatgatcaacataaacaagatcaataaaagtgcaaatatggctacctcaatgctgatggcataacaatggccgatgatcagtgcaaatcctacaaatacaatggtgttcaccggcagaatggcacacagcagtgccaggatcaacacgataaaaaggctgttgagcttctccatatatcccagggtgtcattgatccacataaagtaccccagggccagtaaaaatttcaagaaaggaagtaagaatacctcaatatttccataaatttgtttcagtttctgtttaaattccagcaatgccgtcatgtctatcccctcctgcctgatgtgcggtttttcttttcttcccggctgtacattttattcagcttggtaagcatggcataataagccttcacgctcttctttgcccggaaatacttgactgtatattgaacataagtcagggccgtgaaggcagccagaacgatcagatagccgatcaggatctcagaccccacgtacaccaggttcatcctgtggatgttgttcagcaggaaatccgcgtagtagcctccgatggccagcaggatcagcatatagcctatggttaccaggaaaaagttcttaatgagagccaatccaatataatcgcttctgtaatacttgctgatgggcaggtagttcttaccctccctcttctcgtacatggcaagctgagtcatcagcttgactttctcttcatttatcatagaaatgctccttgttttcgctcttagaattttgtccagtgcaaaattcctgatagagatactcatacatatttgattgtatcatatatccctaaccatgaaaagcatttttagaaaccttttcctacgaaaatagtcaaaaaataaatattttttactccatgactccggatttcctctgcagcagcatcaatcgtgcttccggtggtgtacacgtcatccacgagcaggagatgatcaatctcccataaccccggcgttcccacaaaagcattccggagattttttctgcgctcctgcattcccagcttcttctgtgattttgtttcggaaaccttcctcagacagtgttcatataccggcagatcccattcttgggccattctgtgtgccaaataggcggcctggttaaagcctctggccttttccttcttcttatgaagagggatggggataagcccctggattccccagcgctctatgtacggcctggcatacaccgccgcggcctttgcataaaattcaccgtattccctgcggcctgcgtatttaaactttaacagggaatccttcatcacattattataagtaaaaattccaatcccttcttcaaagctgtgggagactctctggcagtcccggcagtattctgcctctggatcctccagggcttttccacacttcctgcaccggggttccccgataggcaccaacactctggcacatttgggacagatcaggctcttctgatcctttagaattctatggcacaccggacagtgcctgggataaaaccaatttaagactgtttccattgcttccataaagaagtgtcctttctccccgatgacactctcttccccgccgttcatacggttattcttgcatggcctccatgtacaccgtttcctcttgaagaatcaggaacttcccatcttaaatttgttaaagctgagaattctgctgatcaggccaaatacccgattatatttataaacggcttttctttgaaagggtttcaggcagttttttccaaaaggcatatttcagcctcaggccagaccagtattttccgtaagattctcctgcatttcccgtatccgcaggtccagagagctgtaccgctcctgtatcctgctgttttttatcatctggtcaaaggtctcttcacttcccaccactgtcacgcattttctggccctggtgactgctgtgtacagaaggtttctgttgagcagcatcctgggtcctgacaaaagtgggatcaccactgcagggtactcactgccctgggatttgtgaatggtcatggcataagccagttccagctcatccagctgcttgtagctgtactccacaaaacggccctcctcaaattccactgtgagaagctctgcaaaatcattcatgtcccggataatccctgtatctccattgaacacgcccacacccttgtccacaggaatgccgtattttccccgtatctcccattccagctggtagttgttcttgatctgcatcaccttgtccccctgtcggaacagtccctgtccatactctttttcttttttcttaggacttggagggttcaggtatctctgtaggatctggttcagcctctccacccccaaaaggcccttgcgcatgggtgtgagcacctgaatatctgtgtacttggcatccacataggggggcagcttctcctggatcagggcgatcagtacacggatgataatgtccgcatcatatcttttcaaaaagaaaaaatcacggcttttgttatctagtttcaccggctctcctctgtttattttatgggcattcaccacaatatcgctttcaaaggcctgccggaaaattttatgtaattccaccaccgggaatacgccggagcggataatatctcgaagcacattcccgggccccacactgggaagctggttcacatctcccaccagcaccaggcgggttcccacagtaatggccaagagaagggaatgcatcagatgaatgtccaccatggacatttcatcaataatgatcacatctacctccaggggattctgttcatttctctcaaaatgtacactctggtgttcctgcccgtcctgagcaggggctccggacagctccagaagccggtgaatggtctgggattcataacctgtagcctcagtcatgcgcttggcagccctgcctgtgggggcagccagacggatggtgagatcctctgcttcaaaataccggatgatggcattaatggtggtggtttttcctgtacccggtcccccggtgagaatgaacaggccgttacctgctgctcccagcaccgcctttttctgcatatcatccaggattgtgcctgtggccttctcaatgcgggcgatccgcttcctggcctccttgggatcctccgggcactgcacattcaactcccggagcattctggctgtattcagctccagataataatactggctgccatatacaatctgctcctccccctgactcttcaggatcagcttccggtccatggccaggtccatgagatgcttttccatatacaccttgtccacccccagaagctcctgagccctgttaaacagggcatccttgggaagataagtatggccgtccgccactgcctgggtaagggtgtacagaagaccgcttcggatgcggtaatcagaatccgtatggatcccaatgcgggccgcgatctcgtcggcgatcttaaagcccacaccttcaatatcctcagccatacgatagggattttcctggagcactccatagagctcatgaccgtattttttgaatattttagctcccagattcagggagatcccatatttctgcagaaagatcatggcctttcgcatatccgccttctccgcgatctggctgccgatctcctgtgccatgcggggactgatgccccgcacctcagacaaacgctccggctcttcctccaccacccgcagagtatcttccccaaaatggcgcacgatcctggtggccagtgcggctcccacgcccttgatagcccctgagcccagataccgctccatagccatggcatcctcgggaaccttggtctcataggcagtgatctggaactgctccccgtacaccggatgcttgctgaaaatcccttccgcctccaccagctctccctgattcacatattggaaggtgcccacacaggtaaggtcccctctctctctttccttgatcactagtactgtatagccattgtcttcattgcggaagataatatggtcaatatatcctgtcactttttcactcataacccgtccatcccaaaatgcaaaaggggctgctttacacaaccccgtaaatttatctgtttttcgttcccggcagcccgccttctgtacactgtggccttatctatccaaacgcgcgcttacctctgcgtattttcctgttcccacagctgttaccagcatgggattctccgcagtcattgtattgatccctgtccgctcttcaatgatcttttccattccttccagaagggcgcctcctcctgtgagcacgatcccccggtctacaatgtctgctgccagctccgggggcgtgcgctccagaacactgtggacacattccacgatctggtttgtggaatccttcaaagccccccggatctcctctgaggtgagctttgccactttcggaagcccggtggtcacattccggcccttcacctccatggttcttgtctccgccagctctgtggccgttccgatctttattttaatggtctccgccagctcctctgccacaaagagactgtgatttttccttaggtgattaaggatcgcctggttaaaactgtccccagccgccttcaccgtgctggataccaccactccagccagagaaagcaccgctgcatctgtggttccgcccccaatgtccacgatcagatttccaaagggcttggtaatgtccacaccggctcctatggctgccgcaatgggagcctccaccagatagacctctctggcccctgcctggtaagtggcctcctccactgccttgcgctcaatctctgtaataccgctgggcacgcagatgctgatcctgggcttgcggaaggctcttctcccctgggccttggtgataaaatatttcagcatcttttccattacattataatccgccaccataccctgacggatgggccggatcacctcaatattaccggaggtatgccccaccagctggcgtgcctcctctccgatggccttaattctctgattatctttatcatacacaaccacagagggctcttttaaaacaatgccttttcctgtggaatacaccacgctgttgctgctccccaggtcaattccaatatcacttgcgggcataatgctcccctttctcccaatgttctcctgaattgttacccttcattatatacaacttttccaatcttgaaaagtgcttttccccaaaagaacatttcttctatgtgttgtgcagtgcctccggttcttattccgaaagatatttggccacgtactgtcccgtataggaatctggattggccgcaacctcctccggcgtcccctgggccacgatctggccgccccggtccccgccctcaggtccgatatcaatgatataatccgcggtcttgatcacatccagattgtgttcaataacaaccactgtgtttcccccctctgtaagcctgtggatgatttcaatgagcttgtgaacatcagcaaaatgaaggccagtggtgggctcatctaaaatataaatggtcttgcccgtgctccttctagacagctctgtggccagcttgatcctctgggcttctcctccggacagctctgtggagggctgacccagcttaatataggaaagtcccacgtcatagagggtctgaatcttccgcttaatggagggaatgggatcaaaaaattccaatgcctcctccacagtcatgtccagcacatcataaatactctttcctttatatttcacttccagtgtctcccggttatacctctttccgtggcacacctcgcagggcacatacacatctggaagaaaatgcatctcaatcttaatgatcccgtctccgctgcaggcctcgcacctgccgccctttacgttaaagctgaagcggcctttcttatatcccttggccttggcatctgccgtggccgcaaaaagatctctgatctggtcgaaaacaccggtgtacgtggcagggttggatctgggggttctgccaatgggagactggtcaatgtcaatgaccttgtccagctgctctataccctcgatgccctcatgtctgcctgggatagtatgggcccggttgaggaccttagccagatgcttatacaaaatctcatttaccagagagcttttccctgagccggacacaccggtgacacaggtaaaaactcccagggggatctgcacatcaatatgcttcagattattttgtgcagcaccccgcaccattaaataacctgccggctttcttctttccccaggcaccgggatcttcatttctccgcttaaataggcgccggtgatggactgcttgttcctcatcaaatctgaggctttgcccatggccaccagctgccccccatgttctcccgctcccggaccgatatccacaatacagtccgcggcccgcatggtatcctcatcatgttccaccacgatcagtgtatttcccagatcccgcagatggaacaaagtgttcagaagcttgtcgttgtccctctggtgcaggccgatgctgggctcatctaaaatataggccacacccaccaggccggagccgatctgggtggccaggcggatcctctgggcctctcctccggagaggcttcctgtggcccttcccaaagtgaggtaatccagtcccacatcagacaagaagcccactcttgcacggatctccttgagaatctgatgcccgatcaattcctgctgctgggtgagctgaaggttttccagaaaagccttcagattctccacagacatggaggtcacctcataaatattcttctccccaacagtgaccgcaagagcctccttcttcagacgctgtccgtggcaggcaggacagggggtgatcctcataaagctctcatattcctgcttcatggtgtcagagccggtctccttatatcgctgctccacatttttgatcaggcccgggaaggcaacatcgtagattccctcacccctctggcctttataatgaaccttcacggatttccctttggtcccatgaaggatcaaatcctggatatccggggtatagtcctcaaagggagtggacagactgaaatggtactcttgggcaagggcgtccagaatcgcccttgtaaagcttcccttatctgtgcaggactgccacccggtgactacaatggcgccctggtcgatgcttaagcttctgtccgggatcatcagatccggatcaaattccatcttgtatccaaggcccagacacaccgggcaggctccaaagggattgttaaaggaaaagcttctgggttcaatctcatcaatgctcacgccacagtccgggcaggagaagctctggctgaaattcaggaccgttccgtccatcttgtcaataacaagaagaccgtcggacagatccagcacggtctcaatggaatctgtcagccgcttttcaattcccggcttcaccaccagacggtccaccacgatctcaatgttgtgcttaatgttcttgtccagcttgatctcttccgacagttcatagaggctgccgtcaatctgaactctcacatacccgcttttcttagcctgttccagaagcttggcatgggttcccttccgtccccggacaaccggggccagcacttggatcttcgtcttctggggaaggcccataatatgatccaccatctggtccaccgtctgtttgcggatctcccggccgcatttgggacagtgggggattcccactctggcatagagaagacggaaataatcataaatctctgtgacagttcccactgtggaacggggatttcggttggtggatttctggtcaatggaaatggcagggggaagtccttcaatgctctccacatccggcttctccatctggcccagaaactgacgggcataggaggaaagggattccatgtaccgcctctgcccctctgcatagatggtatcaaaggccagggaggactttcctgaaccgctcagaccggtgaataccaccagctcatttcttgggatgtccacatctaaatgcttcaggttattttcattggcccctcgtattttaatgaatggtttttgtatttttttagcaggcatgactgttcctttctacggcttccttttgtcgtacatacgttctgttttcattctatcataatctgagaggaatgcaacagttttttcccatgtcaatccagaagaaaatctgcaaggatcccattgctcacagaaatccccttaccggtcaggcatacacggtgtgcatcctcatgcagaaagcctgtggtggtatattttttcaaaacaggcttatagatctcttccatatctataccaaagtatctccgaaattccttttttgaaacgccatccatggtacgaagccccaaaaacatcatttcctccatctggtccttttgggtgagcacctgccgctcctggtgaagggcagacagatccccgctgttcttcaggtaggtgtccatgtccctttcattggaaaaccgcacttcgtccaccaatgatgcggctcccaggcccagacccagataattctccctgcgccaatagcccagattgtgcctgcaggcataaccctccaaggcataattagaaatctcatacctgtcataccccccttgggccagcagtgtccgggtcctgtcatacatggcccgctccgtgtcctcgtctggcagctttagctccatgaaaaaaaagggagtcccttcctccaggatcagactgtaggctgagatatgctctggcctaagcttcataatggcagcaagggtgtgctcccaggatgccagcgtctgcccgggaaggccggacattaaatccacatttatattggaaaatcccgcctctctggccatctgatagctgtcaaggaattcctcaaaggtatggatcctgcccaggcaggccagctccctattgtctgcagactggcaccccagactgagacggttgatgcctatatgcaggtaagcctgaagtttctcccaggtcagtgtgcctgggtttgcctctatggtgatctccggatctttttcaaaagtaaaggcggattttaaaagaaccatgatctccgaaagctcctgaacccctgcaatagatggggttccgcctccgaaaaacacggtacttacttttttccctttcataaggggtgccgcagcccggatttcttttgccagggccttgaaatacgccctctgccggtccctggtacaggggccggagagaaaatcacagtatgcacattttttcacacaaaaagggatgtgaatatataattctaagttttctttattcataatagccatatccgttggaatcccattgacctgcgtagctgttatctccatatgcagaatccccatatatatccgttccgccagtgtcccagccgctgtctccgtaaccgtaactatttccgtaaccggagctgtctccgtagccgtaactgcttccgtaaccggagctgtccccatagccatagctatttccgtaaccagagctgtccccgtagccgtaactatttccgtaaccagaactgtctccatagccatagctatttccgtaaccagaactgtctccgtagccgtaactatttccgtaaccagagctgtccccgtagccgtaactatttccgtaaccagagctgtctccatagccgtaactatttccgtaacccgaactgtcatagccggatccacttccgctgcttccggacccggtactgcctgtggtgcccggagaatctgtcccctgggcagtcccgttttcattctgactggaactgtcctgctccccgctgccatcctggccggaagcagaggactgggatcccgctcctttgtaatcattggtcatggtcacgctgccgcttttttccacggcatcctgggaaggttctacggtgggtgtgggcgtaaagacggcctttggagttatggttattttaatgattcctgtctccagctcggatttttcttcgctgccgcaccctgcccctgtcaaagtcagcaggatgcctcccagcaggagaactctccttatcttttttctgacttccatacccttatcctcaaaagaagcatccggctgcccactgtgcagccggcctgtcttctttatttgtcgtccagttttaatacgctcataaacgctttctgcgggatctccacatttccgatctggcgcatccgcttcttgccttccttctgcttttccagcagtttcttctttctggtaatgtcaccgccatagcattttgccagaacgtccttacgcatggccttaacggtctctctggcgatgatcttgctgccaatggcagcctgaatggggatctcaaaaagctgtctgggaatctcctccttaagcttctcgcacattttgcggcctctgtcataggccgtatctgcatggacaatgaaagaaagagcatccacctcttccttatttaccaagatgtccagcttcaccagctcgctgcgctcatagccgcacagctcgtaatccagggatgcataacctctggacctggatttcaaagcatcaaagaaatcatagatgatctcatttaagggaagcttgtacctgagaagggcacgggtttcttccatatactccatgccttcatattcccctctgcgctcctggcacagatccataatagccccgataaactccgtagtcaccatgatctctgcctttaccacaggctcctccatataatcaatttccgtggggtcaggaagattggaggggttggtcagctcaatgacctccccgctggttttatgcaccttgtagataacactgggggcagtcgtcaccagatccagattgtactctctctccaggcgctcctgaatgatctccagatgaagcagtcccaaaaaaccgcagcggaaaccaaatcccagggcaacagaggtctctggctcatagaacagggacgcatcatttaactgaagcttctctaaagcatccctcagatctccatacttggctccatccgcagggtacatgccgcagtaaaccataggatttaccttcttataaccgggaagggcttctttgcagggattctgggcatcggtcaccgtgtcgcccacacgggtatcccgcacattcttaatgctggcggtgagataccccaccattcctgcggtgagctcctcacagggaataaactgccctgctccgaaatagccaacctccacaacctctgtggaaaatccagtggccatcatcttgacgggcgttccctttttcacagagccatccatgattctgcaaaatacaataacgcccttatatgggtcgtaaacggagtcaaagatcaatgctttcaggggtttggccacatcccccacaggggcagggatcctggccacgatctgctccaggacctcctccacattgtctcctgtctttgctgagattctgggggcatcctgggcttcaataccgatcacgtcctcaatttcattgatcacccgttcaggctccgcacttggcaggtcgattttattgatcaccggaagcacatccaggtcgtggtccattgccagatagacatttgccagggtctgggcttcgatcccctgggctgcgtccaccactaaaacagccccgtcgcaggcggccaggcttctggacacttcataattaaagtccacatgtcccggggtatcaatgagattaaaaatatattcttctccgtcctctgccttatagaccgtgcggactgcctgggatttgatggtgatccccctctcccgctccagatccatgttgtcaagaacctgggactgcatctctctttctgtcaaaagcccggtcatctcaataatacggtccgccagggtggatttcccgtggtcaatgtgggcaataatacaaaaattacgaattttgctctggtccataatttccagttttcctcctcatttgcagttctgcatcctatctcttcatactttctctatcctaagagaataacattatctgggatttcgtgcaagcatttttccagttccataccttgtggctaaggaggcttttcactggccggacagcacccggtccaggatatccgcaaaaggctccatggcatttttcacctcctggagggtattggtctgggctcctgcctccagaaggagggccttggggcgaagctgaagattgtaccgcagacctgccagataatttcccctgtacagctctgggtaatacatggctgcctggtaaattaattggaaggaaaaagccagattatcctctatgtaagggttgggaagatagtccaccggcccgttggccagcgtatagctcaatccgttaaaattcatgatcctggctgttggcttgccgttgatcttggtgaccagatgctggtcgtcaggaactccgtccctgtgcagatcgatgactacctcaatggagggattttcctccagaagctgcgacacataggcctcagaaaaatcataggctctggcccggtccacttctccgtcgatcacgtcaaattcctcctccacgtgaatgacattgtagccatagttttcttccaaaagctgggtgagataggtgcccacgcccacaattctctgctgagggtctgacaggtctgaatccacaaatccttcctgggaatggctgtgataaataagaatctgaggcttggacgaatccgactcaagccccatatcttcattgagaaagctctcagcattcagttgggcttcgctggccgttgtgttgggatccacaatataaaactgagtaaggagataattatagtccgccagcttttccaaggacagatccagcaccggctgggggaccatggctgcctggcgggcctccgtctccagaagggcagcgcccggcatcccagaagaatcctcctgatcctccccgcctgcctggtctggattcacactgctgccctcactgtttccatcctgggcagtccctcccggatcctggctgtcatccccacgatctccatcctggacaggctctgtgtcagcgccggtttctcccatagccagctctttttcccctgtgccgttttcctccaggacctttttcttcagatatgccctgttagcctgaaggattttatcataggtttccccgtcctttgtgggcgacatggtctctttttccagaaaacgatatatgggcagggatttgagaattttctccggattcaatctgcctccgggaggcaggcgccaatatcccataaatcccagaaccacaactgccgcaaaacaaaggcttacaagcacatacactgccttctgaaattttgacacaccatcacctcttccgtttatcctatgaagaggcgccctagattatacattaagagcccccaagtggtattccccaagaagactgtatggttccatcttacacctgggcaaaggccatattcaatccctctgagatggtatagctcagacgcttcaccgtctcgtcaatatccttgggagtgacaaacatgctgtgaagatggggagagatcatttcctccagaaattccttctgctctgcctcatccaaagcctccagcagatgggccatggcatcatgaacaatggtggctgcatccaccacagtggggaccccaatgccgatcacttttacctgaagggtttcctctgtgaggccctccctgtggtttcccacccctgagcctgggtggatgcctgtatctgtgatctggatggtgcggtttaatcgttttgtacttctggctgccagagcgtcaatggcgatgaccacgtccggctgagtttccgatacaactccctggatgatctccagtgtttccatccccgtctgagccataaccccgggcacaatgccgctgatccggtgcatactctcttcccccatggcattgagtccatattcccggataatatgacgggtaatatggagatttcccactacacccggccccagagaatccgaggtgatcttctggttgcccagccccaccaccaggatggatttttctttctttaaatcaatgatctgtgccagatgattggcgatctcacgggaaatttcccggtggtaatcctcatcagggacagacagattgggggcttcgatggttatataattcccctggggctttcccattgccttggccccgttctctgtgaggatctttaccactgtggttctcacatccttctcctggtcataggcttcatgaatctccacgccccggatctccacattttcctctgtaaaacgctccgcctgctccatggctaagtctgtacggatcttgtaactacccaacatgctgttcttcctccacattcttgtttttgcaaaagtacctgcttacggctgcagccctgctttttctttattttttgcaatttttcaagaaatatgtattgacatccgccttcacttatactaaacttaataagcatgtttccatagaagcgtccgtgtcagtttctatggtcgattttcttataaaaaaatattgatatcaattttaatcttatcggaggtgcacaaaattggctaacattaaatcagctaaaaaaagaatcttagtaaacagaacaaaagcagcaagaaacaaatccattaaatctgctgtgaagacttctatcaaaaaagtagagtccgctgttgcaaacaacgacaaggctgcagcttctgctgctcttactgacgctgtatcaacaatcagcaaagcaacatccaaaggtgtttatcacaaaaacaactgctccagaaaaatctcccgtttgaccaaagctgttaacaccctcaactaatacagcagccaaacggatccacataccttttcgggtatacccttcttctgccttagcgggcagaggaaacagtttttagtactgaaaacaaaaaaagacggacatgtaaggcagctattcccgtcaaatagctgcctttttgtatgcctttttttcttgatctatctaatatatgtgttaatatatcccactgctgtactttacgatcaacagctccacactgagcacatctcccagccttcctgtcttcaccgcctcctccgcatccacaaaatcctccaccgcctgctccagctgctccacagtataagctctggcacaggccgccacgttccgcaccacaaaggagggcacccccagcttctgggcgatctccggctgtgccataccgtcctgggtcattttcttggtgaggagaagctggcggaactgttttgccaaaagaaacagaatccgcatgggcggctcctttaaggtgagaaggtcattgtacagatctaacgccttcttctgattcttgtccgtcactgcccgaaccatatcgaaaatcttgttggtggtctgggtagtgcacacttcttcgatatcctctctggtcaccacatccctgtccccagtataggtgatgagcttctccgcctccatgcggatattccccatgtccgttccagtctttgtgagaaacagctccatatccctctgggtgatccgttttccctcttttcccagaagtcccgctgcccagcggctgagggtcttctcgtcctgcacggtaaattctgcaatgcggcctgcacttttcacagctttatacattttactgcgcttatctacctcggactccacaaagatcaaacacacatagtccggcaggtccttcatatattccgccagctcgtcacatttattcttaaaaaatcccgtatcctccagcagcatcaccctccggggggcaaaaaaaggcatggtctcccccagatcgatcagctccttcacatcgatcccctttcctgaaaaccgatgaaaattcatggtgtcctcctctggcataagggccttcagaagcttctgcttgtactgcagcttcaaataagcctcctccccatagagcagatatgcctgtttaaatgtcccgttctttatgtcttcctgaatgcttttcaattttccactgtcctttccggcacaggcaaaaatcctgccgcctgtctgaagcaacccaaagcagactccagacgtgtctacccatacgaagtgatgaacctgtttgtgaacaacctgataacagatctcttctttgtattgatatactagcaactccaaaaaagaaagtcaatgccctgtgcccaattgcccttttgccgtgaaggaattgaaaactacagtattccctaaaaaacctgatggaccgcttgtctctatggctgcctccatgctgcaggcagagaaaaatcctgcatatctcacagaggttcagaaatgttataaacaaacctgtcaatgtagatgcataacataactgagaacgtcgagcatagagtcatgtaaaccatgggcgatgatcagagagagcagggaacaatttttgaatttgtatctgcagatcccccaaaacgcccctgtcattccggcgccgaagacattgccaaaataaaggatacccttaaagtgtgccacgccaaacaggaaggaagtaaccagaaccgccaaagcttcattctctgaaagctccgtgatcctataatacaaatatccccgaaaaaccaattcttctgccaacgccacacagaaaaaatacaataaaatcatcatcaccagttgaggaaagctttccgcccctttgcccaataccatatgggcattccctcctgctataggaaggagtacaaatacagcaaagttgcagaaaaacgcaaaaaaaccccatccaatctgccttaacagattctgtttccaaaagccgaattttttcagatccaccttttttaactttatatacaaagcaactgacacactcatgagaaggccagaagtgatcgtcaggaattttccgttaatcttatattttctccatagatagttggccaaaaggctctccgaataaactaccagaaaaacaaccacaatttctacaaacccttttttctgttctttgctcatacgttctcctccctgtgctactccttgcttaacgttctcattctccagcagctctttgttgttttataagtataccatactccttcccccttctgcaattatctcaatcgaggatttcctttccggaaatcctcttgttcttcacctttatgtgcctgataaaaatgggaccaccctgcacttcccctcctgtagtttcaaggtaactgccccacagtctttcgtgatccacacctgcacccccgccgtctccagacgctccagagtttccggggagggatggccgtaccggtttgtggccgagcaggagatcacccctgcccggggcttcaccttttccaaaaagtctgtacctgtagaatttttagacccatggtggcccaccttcaggaaatcacacctttcaagaagaggtaaaagcgccttctccgtatcctctcccgcatctcctgtgaacagacctgtaaagccctcataagctgctcgaaaaacaaggcagttctcattaatatcctccttctgcccttccaggggataaagaacctctatggaaagcttcttcccctgcagatgattcccctgcttcaggtatttcactggaaccccggctctctttgccagcttttctagcttcacataagcctccggcttgtcctcccacttgggcagatacagacatttcatctgaacggccgtgagattttcccctcttgcctgtagaagctcctcaaccccgctgatatggtcatgatctgtatggctgacaaaaatcccgtccagaaccccgattccccggctctttagaaaaggcagaatgtcataggtgcccacctgggatttactgctgctccctccgtcacagagatacacaccctccccgggagcctccaccacaattgcgtccccctgccccacatccaggcaggtgatggaaaatacccgttccccaggatatcccaaaagaaccacagccccggcaattcccagcacacagccagcctttggagccacacttatccacagacgcttcccaggaaagctcccatctttccacacccatacacaaattccaagaattccataatacagccctatctgccataacttgggctttcctccaatccaagtgcaaaaaggtattctgcaccccaggctgcagaggaactcataggccttcagcaaaagccgcgccggccagatcaccccccttcccagccagggccacaaacaccccacagccatccccccgatcccaagccccagcacagccgccaaagtaggaatcaccaaaaggttcagcaaaatcccatacacagacacctcatagtaaaaatacagcaaaacaggcagcgtggtaagctgtaccgccagagaggataagaagcctcttaaaagcttcctttttgccggaatcccctccagcagagccggggctgtgacccccatccccaacacagccccaaaggaaagaagaaatccactgttgtacagataatccggagattccaacagaagtaaaatggctgcaaaagccatggcagtgagcatatcataggtgcgccccagtatttttccgcccacgcttaacaaaaacatggccactgcccgcaaagtagccacgcttccccctgtaaaaagtccatactggaagatcaccgccagtgctgccgccccggcagccccgtttcccaggcctgcttttttcagcagttcaaacagccccattcccaacaaggacagatggagaccagaaatggcaagcatatggatgatccctgccatttgataacggatcttggtctcttgatccagcccgctcttatcccccaacaccatggcctccagcacacctgcctcctggccggcgatttttccaaggaccacacccagacgctccctaagtgcggccatagcctccccatagggagaatgtgtttcagaaactttctggatcactccctgatacataagataataaatattctgggcctgataatactgtctgctgtgaaaaccccctggattcctgggaagagctgtcctctccagctttccgtataccacggccatggctcccacagcgggtgtttgttctgtttttaggaaaattctgatatttccaagagaatatgtttcagatttgtagataagcttagaatctttcagataaatagatgatgatgtttcactctttgtccttgcggacacctttcccaaaacctgcaccttgggatgctcctttagatactcctggacagagacagaaacgggagtctccctccataggggaaactcccatttgtccaacagcaggatggcaagcatcataagcaggcacaggcagcatatgggtctctgcctcatattgcctcctctcctttttggtcacttttctttctctgcatccactgtctcagtcttttgtacaagctttttgttaaattcataaaagctgtttaattccatggtgtcccgatatacccggttggaattcccgtccacagagatctggaccttctccacattgcaggcttccaccacggaattggcgatggagtagatcaccacctctggctgcacaggcagagtggtatccccaaagctttcatccagattaatgtagcacactccgtctgatgtgactgcgcttaaaatattcatatccttgggcagggtaggttcatgtccctcctgggaaggccccctaagaagctgctccaggaccactctttccctgggaagattgctgctgtaatagagctttcttgtctcaggtatgagcacggagcctgtctcatctgtaaaatacagattcaaagtgataaactgataatcacctctgtcacgtccaaaatgcccggcaaagctctcccggttcatggctcctatttcctgacccttggaatccgtcagctcttcccctgccacctttattttaacggcagatacctccggcacctgaataaaattatggaccagggccgcacgcaccaggatttcccggatcacgcccatctcctgataaggctcttcaaaattcaacgtgagcacgttctgggacaattcatgattggatatggtgactccttccgggagcagattcacaggctcctttttgtcatctgtgtttccaatcctctgttcaagctcctggatcataccctcagaagactcatccgccggagtataaggctccttcacaatatctgtctcgctttcatttatggaatacagataatagtccgactctgccgtctcttctttctccttgctcttcatatctagggagcaccctgcaaaaatgctcacgcacaggagtgccaacacccctgttttcatccatcttttcactggctgcacctcctaaggaatataagacagaggaatccgaaccgagaaggtggtaccctccccttccttgctgaacaccttgataatgccatgatgcatggcaatggcgcttcgggtgatggcaaggcccagtcccgtgcctccgatttccttggaatgggacttgtccacccggtagaaacgctcaaagatacggtccagggattcttccggaattccaataccggagtccgcgacagttacatagaaatacttgtggtctgcatccagggatacccgcacccagccgtcatccacgttatatttaataccattttccaccagattgctcacagcaagggtgaacttcacctcgtccacgtccgcctccacaggccggaagctgtccaggatcaggtcaatgttccgcttgtccgcaatgggccgcagacgctttaagatatcctccaaaagaagattaatgctcctatgctccacattaatatcgtccgcccgtttgtccatcttcaccagagacagaagatctgtgatgatcttattttccctgtcgatctctgtggtgatatcctgaagaaattcctgatacaggtcctctggtaccccctgctgtcccaccagagaatccgccagcaccttcatagaagtcattggggtcttcagctcatgggacacattggacacaaactcctgtcgagaatcatccagaaccttcatcctggaaagcattttattaaaagcgtctgtgatcagctctgtctccgtatagtcctttaccgcaatggaatccttctgatatccgtccgtaaggtcctcaatggacttggtgaccctggcaaaaggcttcaccaaaacagaggacaggatataccccagcaggaggacaactgccatgacaattcccaagatgagaagaaatctctgctccaaaagctggatggtggtgtcgatctcacttgtggaaaagctcaccagcatgactccctgcatttgctgcacatcggggcttttaatgggaaccgccatttccaggagctggttcttcttattgtaatggctgggatattcctttcggaagcaccggatcacatcagaggagatcaacagctttccctggtcaatgttatacgtatccttgatcaccttaaaatctctgtcaaccaggcgtatccttccgctgtacacattagacaataactccagctttccattcactgcctgggagctggagtcactcatataattttccttgatcaacagattacataaaatatcgcactgattcttcacgccgctggtgcgcaggtcaatggcccggtcctcataaccgctgatgatggcctcccccaccacaacgcagggtacgatccccagaattaccaggatcacaagaatacgaaaccgaagacttttaaaaaacctggaaggtctcttggcatgcttcatggcttatgcctggaagtagtatcccacaccccatttggtgtgtacgtatttcggctcactgggatttgcctcaattttctcacgaagtctgcggatatgtacatccactgtgcgcacgtctcccggatattcatatccccacacaatattcagaagattttccctgctgtataccttgtttggattaaacaccagaagctcaagcacatcaaattctttggccgtcaggttgatctccctgcctgcgatgaacactctgcgcccttcgcagtccagcttcagatccccggcttccacggtcttggccttttccttggcctcgctgtctcctcccgcacggcgcataatagccttaatgcgggcttttacctccagaatattaaagggcttggtgatataatcatcggctccatattccagacccagaatcttgtccatatcctcgcccttggcagtgagcataacaatgggtacattggaaaattcccggatctgctggcagacctccagtccatccagctttggaagcatcaggtccaggagaataatatcatatttgttctccctggccttctccaccgcctcttctccgtcataggcgcagtccacttccatcccgtcctgctccaggctgaaccggatcccctttacgatcagcttctcgtcatccaccactaatactttcctgctcatgcttttctccttattctactgcaatctcatcttttatcttcaagaaggtaccttctttgatcccttccacgttcataatatcttccacacttccaaaaggtccgttggcctcccggtaggcaatgatcgctcttgctttggatgccccgattccggtgagggtcacaagcgctgcttcatccgccgtatttaaattcaccttcccgcttccggcctcctggccctgtgcctccccttgctgtccctggggaagggcctgtgccagagcttcggcctcctccaaggtgggtacgagaatctgctccccgtctgtgagctctctggcctggttgatgccggacaggcaggcctgggaggtaataccgcctgctgcctggatggcctggtaaacccggtccttaggcttaagagcatagacccccggccgggccaccgcaccgcccacatctacataaatgatctcgggaacagacgtctgggcaggaagtgtggcttcctttgctggctccctggtaatttcctgctccaatgaaagaagttctccctcatcctgaccgcagcctgcactgctggtccataacagaagtatgcttcccaggagaactacctttttcttccaattgtttttgttcatctgtgacctcctttacacctttttgtaaagttccccacagatatacataaccaattttcattttaacgaattttagtcaataatacaataggcaaaacccattattttttccacttaaatataataattcccacaatggcaacagccatcccaagaattttacgccactcaaagggctgcttatctgctccgaacattccaaacagctcaataatatacgccaccccaagctgggagaccacaatgagcatggctgccttggcaggtcctaagctgctcatgctcatgatcacggtcactgtgataaaagccccgatcactcctcccagcagggtatatttattctccacctgcatcagcgcccccacgctctgtcttcctgtaaaaagccaggcggccacgcacaccacaaaggccgacaactgaacccagcctgtggaaacccacaggctggtctgttttgtcacttctgtgttaaatacgccctgaatactcatcagagctcctgaaactaacgctacaataatgccccacatggtttttccctccgcattgctatctgattttttccttacagataggatataccggccagagaaaatttatgcattccggtggaaattactggcgcatagatttcagggcgttgcgcagcttgatgggatttccatagcgcagggttccgaaccggaacattttcgcagctaagattcccactgcaacacagcttcccaggagcagggcaaaggagaggatcacctcccaggacgccacggttcccatggacacacggataaacatggcatttcctgaggtgaagggaatgaaggatgccaccttcatcatcatgctgtcgctgtcctgaatcattccaaacatagccaccataaaggaaatcacatagaggatggtgatggtgctggagctcttgctgatatcctcggtctttgacaccatggctcccagcattccataaataaacgcatagagcagatagctgagcatctcaaagatgataaacgctcccattaccttaccaggaatatggagaaggaagtccagctgtcctccccaggcatccccgaagagagcgtaggcgccgaaggcagctcccaggataatccccatctgcaccacccctgcaatggctcctgccagcacttttccgcagatcaggctgttggaattcacactggtcacaaggatctctatggcacggttgctcttttcattggtgacagacacagcgatcatctggccatagaaaagaatcaggaaatatacggcaaagatgagaatataggtataaaggtaattaccagagctgttcttgcccaggatcacaggctccacgtgcacagctatggcggctgcctctgctatctccgcctgggtcagccctttgtccagataatacttctgctgcatatagtcagcgtaaacctcctggaattccctggccctgttgtcgctcatctgaaggttgtttaccacatagcgggcattggctccctctacgataaagcctgcctgaatcttttcttccttcacagcctttttcagggcttcctggtcatcaaaggtctcccactgtcctgaaagggtcttcagtaccccatccagcagctccatatctgcatcgcctggatagatgcccagaagctcttgcgaagtctcactctcggtctgtgtgccgctctcctttgagctgctctttaaaaatccggggatcagggtgggaacgatgatcacggccgctgccaatatggccaggcctatggtggtcactaaaaaggtcttattcttaaaataattgtccagctcaaagcggagtactgtcaaaaattgtttcatgcctcatcacctgcactttctacaaagatatcatttaaggacggctcgtataaaccgaaatgctccaaatccacttcctgctccagaagccttctcaatatcagcggcttgttttccggttgtctcttctttacaatgacacggtccttctgaaccttctccacctccagaaggtccgaaaaggcatccttcaggcgcatggccagctccttggggctttcctccaggctgctgacgatcaggcggtcacggccgaattctctcttaatctcctttaactgtccatccagcacaatggctccatgattcaaaatggcgatatcctcgcagaactcttccacatagctcatttgatggctggagaagatcaccagcttcccttcctggatctgctctgtgatcacatcctttaaaatctgtgaattcaccgggtccagtccggagaagggctcatccaggatcacgatctgagggttgcacagcagggtctgggcaagctgcaccttctgctggtttccttttgataaggtctccagcttacggttctcatactccgatacctccatgcgctccagccacttcttcatgctggccttggcctccttgtagttcaatcccctgagccgtcccagatagataagctggtcagccacggtcttcttgggatacagccctctctcctcaggaagatagccaatctggaaatcctttggcacaaagggctttccatccatcaggatggttccggagttggccttgaacacatccataaggatccggatggtggtggtcttaccagcgccgttccgtcccaaaagtccaagggccttgccgctttctatagagaaggacaatccatggaggacctccttgtctccaaagcatttcttcaagttctgcacttccagtttcataattgtataatactcctttctcagctgttcagcttgcttcgctgaatcttcattgagctgacactatatacagtcacaagtaacaaccaaatcacacagcagatgatcaccgcaaagatgcctgtattccaggctgcatggcagaccatggcgatcactgtgagcaccggcgtcaatactgataaaacctgataggtcttataggatgactgatagattacttccttctgggcctcatcgcagctttccagccactctctgtcgaatctcatgtctgagggatcgccctttcgttccgggtagatcttctgaatctgtcgtaccatggtgatctgccagaagctgctggccagacattggccgataaatagaacacacagcaatattagattctgtttggtcatctcttcaaggagctctccttcatagatggtgcacacagccaagatcgccacgatcatattggtcatcaataataccgtagaccaggacgaccaagaatccaggcggttttccagataatcactttgatcctcgttctcctccttaagaaaacgtctgccatagttccggattttcgtatatgcacagatccactccaccagggaacagatcaataaaaatcccagaacccacaacacatgttcccgcacagtcaaaacggcttcctgggcaaaatccttcacgccttctcttccaactctcaccaggatgctggacaaagccccgatcaccataaaaaataatgaccatagactcatctttatgtaaggatttaatttccttttcattgttcatcctcctcgtagataaagatatcctccacctgaacctgaaaaattttagccaatttcaatgccagggacacggacggggagtaatcccccctttcgatcaaactgatggtttgacgggagacgcctgccttttttccaagctcggactgattgatgcccagtcttgcccggtgctccttcaaccggttttccaatggcatgttatacccccccccctaacttttcataaatttaccagcttctctcattgttctcctttctgtctgtactttgggatacagcttatccttcttaagaattcaggaatctgattatgactaaatcttttgtcattttgacaactttttttgtcatttcatttgaccccagtataacagtgacaactttctttgtcaataggtttgacaactttttttgtcaaaatgtgggtgggggatcctggtagtttttttgttgaccaggcagaaaaaataggctatgctggatttatgtgttttggaacgtgacttggaaggaggcattaaatgggagaaaaggacagcacggaaaaaagcggttatctccgccaggatttccggctttttcatataaaggaccaggtggagaaggagttctcttttcattatcatgagtttcacaagatcattgtcttcctctccgggaaagtgacttatcatattgaagggaaggcctatcatctgaagccctgggacattcttctggtaaaccaatatgccattcacaagccggagattgacacctgtgtaccctatgagcggttcattctatggcttcaggctgactccccggtatccagggagctgtgtccctgttttcagaaggccagtgaccggagctttaatttgatccgtctggactgccaggtccaggagcacttaaaggacctgctgtatcagctggagctttccctggactccacagagtttggagccggacttttaagcaaggccttgtttactcagttcatggtttacctgaaccggatttttctcaacaagacctatattctggaccagaaatcctatacctatgattcacagattgagaacctgctgcggtatatcaatcatcatctggaggaggacctgtctgtgacttccctggcccagaaaaattatgtaagcaaataccaccttatgcgcaagttcaaagaggagaccggctataccctccacagctatatcaccagcaaacggctgcttttggcccgctccttgatccagaagggaacccctgtgatgaaagcagcccggcaaagcggctttcaggattataccacctttgtccgggcttataagaaacaatttcattattcaccaagcaagcagggggatagcttttcttaaaagccatccccctgcttctcagtagagccccaaaatgagatacacgaatcccattgccagcagttcacagggcagcccccgaaaggccggaccgcttctggaatactccagctttttaaccagggaccaccaaaagattagaccgatgagtattcctgctgccagtccccccatttccccaagggttatgattctcacaggaggatttagaacgattgcaggcaggatcaccaaaaagctctgctccttagatacatttttctttaagatgccacaggtaaatgcaaggcacaggcctgcggccagaaatccaaagcctgtaagcccaaagccttttgacacaaacgggaaggtgccaaggctgtatccaaaaatccttccatctcccaggaattctcttaaaattcccaaaaggatccaccacccccagacaaaggccccatcccacagcacctccccgtaagacccatcctctggctctgccagagcgtggcctcctgtcagcagccccacaagcccccctagaatccacggctgggggcttccttccatgtgcagataggtccatgtgagggaaaaagcacaggaggtgaacacgcctgctgcctccagaacacagagcacaaggctccaccggggcagggcaggctttagaaggtctcttaacaacagggtgaaaactgctgtggcaattaccagaatcccagacaccagggcctcccggaagcctgtggacaggaaaaggactgccaatgcggctgcccccatgggaaattgcagccagtctttctctttgcctgggtccatactgggttttatagactggaggaaggatgttccaaagattttctcactgtgtttcatgcttctgccccttttaaatattcataagccttgtttactcctctggctgctgccgtggaggagatggtggctccggagacggcatccacggcagtcccggactggccggcattttcctgatccgtagcctgcccggactctgaatcttgtactatccctgcatcttgtactgtctctgtatcttgtactttccctgcatcttgtactgtccccggtttttctactcctgccgcctcgtaaatcccttgcctcacaagctctataaagctgcccacggaaatgctcactcctgccaccgtgtcaatttttccctggtcatcgggtcttagcatggacagggactgatccttcagcacagcctgggccagtgcatctgcctgctccttccaggtgaggccgtcctcggtcattacatactcccctttttcagagagcacacgctttccatttccttcctggtctgtctcgtcccataggatctgggtgatttttccgtcctttactgtcaggtttacgatgcttgtgtaatcaccatttttttcctgggctgtatattctccgtcctttaaggtccccttctgaagcagctcctctgtttcatctgttccttcctggccgttgtcagagccatcctcttctgacgcagagctgtcctgcccctggctttcatccaaaagctccagcccggccatggtcaccggtgccgaaatgtcccggaactgcttcagaaattcttcctctgtgatcttggagcccacgccctgcgtctcctgctgttccactaccgtgagaccggtgaccttctccctgtcactggcaaacttcacatccataaggatatctcctccataacccttgctggacaccgtgaccacatatccctgtacctggccctgggtgtccttgagccttaccgcctggcggatgccctctccctgaacttccatgagttcctctgtgtaagaagtactctcaccctgggattctgagctctcctgccgggaaaagtatttggtgcccaggatcaccgcaaaggatattgctgtaacacccatcagggccagtatgcctctcacatttttttgatccataatggttcctccaatttagtcttccacgccatacacgtggtattttttcttgtaatactcagccagtatcccgctgaggcagttggctgtgagaattcccagacagatgccctctgggtatgggctgaatatgcgtatggccgccgtgatcaggcctgccacaaccgcgaagagaatctttcctctccgggatatatatacataatccgtgagcatgtagcagcctcccaaaatgagaccgcctcccagcagatttcctaaaagatctcctgtaaaccacccctgggggcctgccatccaggttactgctgtgacagttgccacgtacaccagggttgcctctgcgttaaccacgcccttaaaacatagataaccgaacccggccagcagtaaaagcttgctggtctctcccattgcccccgggatctctcccaaaaacatctgccagtaggaataccctgcctcgccggtatttttcagattcaaaagaacggtggcggaggatacctggtcaaccacaagggtccggggaagaggatttctcagcacggttcccggccacaccaccataatgaaaagtcttcccataagggcaggattcaccaggttgtttccaattcctccaaacatctgcttgaccaacacaatggcaaatatgccggccgccccagtcacccacaccggggtggtcaccggaagattaaaggccagaaggatgcccgtgacagcggcgctgaaatctcctgcggtgatctgctttttggtaagcttctgccacaaatactcggaagccacacaggagatcacccctgtaagtgttaataataaggctctgaggccccagtaatagcaggcccctgccagtgcaggcaaaagggaaatacacacatctcccataatgtttctggttgttcttggcccccgcagatggggagccggaatttctccctggttcatgaattctccgccgcctttctcttctggatcaattcctttctggcctgtaccacccggtgggccaggtgccttctggccggacagatataggaacagcagccgcaggcaatacacgcctgggcataaagctgggcgcacccctggggattcttgtccaaataggccatctcgatctgatatgggatcagcccggcagggcacacctgggcacaggcattgcaccggatacagggggtttcccggatggtttcccgcctgagcaccagaaccccggaagtggtttttgtaacctggcccagatccctccagccgtcccagtctgtgtcaatgcatgtcccggtcatgggccctcccaggatcacctggtttttcctttctgtgacaccaccgcaggccagaagaagcttcttcacattggttcccacaggcaccagataatttcccggatttttcacatagccggtgacggtgaccattctggaatccaaggggcgccctcctagcacagaatcggccacggccttggctgtgcctatgttagacaccatggctccgatctgggccggaatggctcccagaggcacctctctgcccattacagtctgaatgagctggcgttccccgccttgggggtatctggtttttaatacaacgatttgaatgtcacagggatcctcctccaaaattttctgaaaaagggaaaccgcctccttcttattatcctcaatgcacaggtacacgctttctgcctggcaggcctctttcagaagccggcagccgttcacgatcccatagggctgttccatcatcagccggtagtcacaggtgagatagggctcacattcggccccgtttataagaagatgagtgatctcctgggtggtggaatatttgatatgggtaggaaaccccgctccccccattcccacgattcctgcggcttctatcttatccagaagcgcctgccgggatagagctggaagggggacgatcctttccagatattccccggtgatgggctgctccagccaggaaatactgggtttgtccatggtgagttccttatcctggccgtttgtaggatgaatccctcccggaaatccctgcctttgttcaattttctttaacatgaatgtgtatgcccctttctgtttcctcccaactgccccagaagcacttccagcctgagcccatatgctttatcatccgtctgggccggtgcgtaactgatacagaatacctctcccatgcagtgcagtccttggggagtcttatttgtataactgggaattccaaaggatttttctgttatacaaataaagattccccacatagccagaactatgagaggaatcctcgaaaaaattatataaagttttttactgtattcttttcactgcattcttttctctacatcttatagaaaaaggaacttacttgctcaaggtaaaatattcatgaattccattggcgatccccctggccatagtttcctgaaagcataataccacacaccccggttataaaagccagtgacagcacaataagcgtttacaatccaacgttttttccgtgaatgtcagccctgcataaccgtggatgactatgtcaaatgtgggcggaaaaaattccttttctttttctcaggggtaacctataatggaggtatcttttggacaggagaatttcatatgcctatgtttttaaaaagaataacttttgctgtgtttcttgcaggaacagcccttctccttctggggggctgcggcagctccgcccctgagcaagatcccatcactgcccagtcctttaaactaaacaccataatcaccatctccatctatgattctcaggacaagtccctcctggaccactgtatggagctttgtgactcttacgaagccatcttcagccgcaccaatgaggacagtgagctgtacaagctgaaccaccatgagctggaagacagcaacggcgtctcccagatttccctggagcttgcgcagctggtggaagaaggactggcctacagccgtctgtcccaaggggcctttgacataaccattggacccgtctcctctttgtgggatttcacctcagaggataaatccgttccacggaaaaccgatatccaggccgccctatcccatgtgggatacgagaatcttcttctgaatgaacgccaggttcagttcaaggatccaagaatgcagctggacctgggtgccatcgccaaaggttatattgcagacaaacttaaggaatatctcctgtcccagggggtaaagagcgccaccatcaacctgggaggcaatgttttgtgcatcggcagtcatccagatgggagcccctttaagatcggtatccagaagccctttgcccagcgcaatgaatatcttgcaatcgtggatatcactgataaatctgtggtctcctccggagtctacgaaaggtactttgaggaggaaggaaagctgtaccatcaccttctggattcccataccggctatccctgcgaaaataatctggtggcagtcaccattatttccgatcgttctgtggacggagacggcctctccaccgcctgcttcaccctgggattagaaaaaggaatggatctggtagaaagtatggttccaaaaacccacgctttctttgtcactgaggacaacaaaatccactataccaaagatttccaaaaggaactttccattaccgaatccccgtaaatgcaatccctccacagtccgtcctctcgtatttaaggattttctttccatcatgggatggagaatcctcatttacatatttgaagtatttgcttttttccataaggctcattataatgattgtcagagggagagttaaagcgggcttgcccgctttattttacagacacggaaaggagctcatccatgaaggaacataaaaatcctgttgtacgattggctgtcatattggcggtcctgctcatctgttccattggttatttcggttataccaccctgcaggagatccagtccgccagggaggaaatggcacaaattcagaaaaaagcccaggaagaagaatcccagatgaacgacactttagcagccttaaagaatgaaaatgaaaagcttacgaaaatacaggaagtagaacagtccctggaggattcccctacagcggatgcctcccataaagaagattcttcggacacagcagatacccagaagcctgagatcactccccagccctccccgctgctgccaacgccaagcgtcaccccagcggaaaacggccatatggttgccatagaccccggccatcagggagattgggtggacatgtctgctctggagccagacggaccaggctccagtcagatgaaggcccgctgctccacaggcaccacaggaagctatacaggtgtgccggagtatgagctgaacctggatatctccctgaagcttgaacaggagcttaaaaacagaggctacaaggtttatcttaccagaacggacaatgatgccaatgtgagcaatatggagcgcgcccagaatgcctcctcctccggtgcagaaatctatgtgcgcattcacgccaacggagaagagagtcatactgcaagcggcgcactcaccatgtgtccatcccagagtaatccctatgtatcccatctttcccaagagagcttccggctgtcccagaatatcctggatgcctactgccagtccacaggcttatccagccagggggtacagtattatgacaacatgtctgggatcaactggagcgaaattcctgtaaccattctggagatgggctttatgaccaatgaaaatgatgaccggaaaatggccgacacttccttccaggagcttatggttaagggaatcgccgatggtattgacgattatttcggtctatagaaagaaggagaactgccatgaagtttaagaatgttttgattgttctgctttttgcagggattttaacactaggcggaatgtacctgcacacattaaatgaactggtggaggtaaagacagaaattgccggcctgactgcaaatctggactctctcacccagctgtcccaggaaatcacagaccaggcaaatgtgaacagtaaagtatacagtgatatcatgggcctggtgcctgaagaggagacagaagatggttccgcccaggaagatccagataataccgcacaagctgaccaggatccttccccacaggcagatcctcaggacagcgcagaaccagtaatggaaattgaggatgtgggacaagaggaagagcccagggagcttgtgggtccccgcataccagacagcgccgtccaggaaaaaggagaagaaacccaaagtgcctcctctgcccaggatggctctctgtctgcctccaagggaaaggattccaccttccaaagcactgctccggcccccttgctgaactatattaaccagcagcttgagactctgaacagccagaacgggcaatgggccgtctatgccgcaagtgtggatcaccgctcccaggtttcggtacaaagtgagaaaatgcaggccgccagtctcatcaagctctttatcatgggctgtgtatacgacaactacgaccgtctgtcccaggcatacggacaggagtctctggaccagaatctaaaaaatatgatcactgtcagcgacaatgatgccgcaaaccagctggtcacctggctgggagacggagatgcccaggggggtatggacctggtaaatgaatattgtgaagcccacgactttcaagacacccacatgggccgtctccttctggcctccaatgagacagatgacaattatacttctgtaaatgactgtggaaacttcctgactgctgtgtacaaagaagactctgccttctcccacacccaggacatgctcagtctgctgtccgcccaggagcgcacaaataagatccccgcaggacttcccgaaatcggggacatcaaatgtgccaacaaaaccggcgagctggatactgtggaaaatgatgcagccattatttatcagacacccaagcaggatttcattttgtgcattatgtcccaggagctgcaggacacttccgctgcccgggaatccatcatccagatgaccagagatatctacggctactttaatgagactccccagagcaccccataaaccgcaagccttttgtgttcctccagccgtgtgttgcaagtaaccagagccgccatgggagcatccctggaaacaggaatatcaatgggatacacagaagcctccctgagaaattccagatgctgtgcatattcctctgttcctggcagataatcataagcaaagctttcacttcctacctgggcctgctgtacagaaaaaatccggtaaaccagggtattgccccctgcataaatgaagaataagggatgctgctccaaataggccggatcctcataggcattcaagctggcaaacatagccccgtccaacatattatgcccatagatgaaggaacaggaatcggaaaaatcctgggcatgttcccagcccagaaaaatagccccataatcgctttcctccccttccagactgtgactgagataaaactcattgtcctccccctggaccacaggataggataccgaggttcctggtatttccagccaggctattacacgagaattccaccgggacagcccctgccagtcaatggggctgcctcccccggaggccgaagcctcctggggaaccagtaccttttctgccggaagccgctttacaggctctccggccttctttttttcctgaaagggggagatgccagggggctgccaggaaggatcataaaatttttcctttaaggtatcataggcttcctccacttcttttaatctttcccggttttcaataaaaaatctccctgatataaacagcagaagcacacctgtaagtaaaatcagcctgcccgcgcaaattttcaccgtttcttcctcctgctccagaaaattcctgccccagccaaaatgcagcccagcccaaatacaaaacgcatcactggaaatggccgctcgtcaccggttctggctgtgttggctgtctttcctccatagtaattcccctggctgtcccaataggaaccatttccagaaggattcaccggccttcctgtcacggtggcaaagggcctctgggagacccctggacttgcctgcggcctgggcccggcagtggggctaggaactcccgtcggataaggagtggcccctgaagggatcccagtgggcgatagccccggagcaggcgtgggtgttttgccaggcacaggggaaggggacacctgccccggcgccttcgtgggagtaactgttggaagcagggtctgtctgatctccacttccttggctgccgtcacccatctggtatccagataatgaagggtctcattggtatttcggaactggtcagaagtccaggtggcctgggtgagttccgtttcctcagccctggtctccctcacctgggcaacgttcaccatacagtcatcctcacccgcattggtaaccttggctgagaaagataaacgtatggtttctttggcctcaagctccgggatgtagaatgtagcgtattctttcccctctagatcttttctttccattttaatgcccgaagcctgctcttccgtaaacttgacaaaggtgaggggctcctttatttcatccttcaccagaaggttctttttcaactggtcagaggtgttggtgaggacgatggaatattggatcacatccccgtttttcaccagacttccgatctccggcgaggattccttcaaagcagtcagtccctccgagacttttaccggggcaggaaccgatgcctggggcggttttatattttctgccgtggccctggccacattcaggaccgactgcctggaagaactgatcctggcaaactgcacatcataggtcaccaaaaaagactctccatatcccagggccgcccctgtataaatggcgtaaccctgggcggtctcctcgatctctgcctgatccacaggcacctggttggtatttacaatcttcaggctgcccttcaccagctctgcttctgggtccatgatcctatccttaataaccacattcctggcctgggtacccttttctgtctgggttacctttacctgatagtgccccacctggcagggctgatactgctctttgtctgcggtctttacaatctccagcaccggttcctcctcagttaccagcacctgacagtctccctggaccggaggcgtattctctccctgggcagccgccgtatttgtaatgatctgaccgtccaaagccgaggagacaaaaaccacctcataaaacacctccagcttatcttcgatcccaatagaggctcctgtacggatggacaaggttgtatccgagacttccatgacctcaggagtaaattccttgccattaagcctcacgcggatactctcccggtctatgactgcaccttggatatccattgcatctgtgatggtcacattccgggccatgatctcatcccgcagctctctcaccgccagccggaaatagcctctgtcccctacctgatactctctgcggtccgcctctttctcaatatccaggacagcccctgcgatttccacgatttccttgtctgtggagggattgtcctcgtcgctgtcagcggctgcttcgttttccactgcactgcccgccagattcaagtccaccacttccacggaatattccactgtcattttcggctccctctcaacacccggtggattgtaggtatccatccggcgcagtcccccctgaaaggcatcccaggcataatagggcacctcccggatcaaggaccgtcctgtataaacggtgaaggtgttctcctcaacctggatctgggccggctcaatcttccttccctgggcatccagcagcacgatggaatttttctggagcttcacacccggggtgcgtacaatgtccgtcaaagtcacattctttgcctcacagcctgtctggtcctggtaaatatccactgtgtaggtaatggtatcccctatggaataccgtccccggtccgcatgcttctgaacttggagcaccgggctgttcacccagattctctcgctgtccctcacctcactgccgttatccgcataggccagggctgtatttacaatctcccagccgttcaccgcctctgtggcgacacagtgacaggtgatcaccaaaggctgcgtatactggttcagctcatctccctgggtacaggggaaattatccactcgcaggacatagcctgcccctgcttgttccagggtatagttcacaggcagaatctctgtctccttataatgatctgcattgatctcattgggcgggtcaatccctgtaatgggattcacgatagactgagggattccctccacggtcaccgggctctccacaggagccaggacaatcccctccggaaggctgatgtcctccaccaccagattcctggccacagaccccttctgcatatttcttacgatcacctgataaatgatctcctctaccacccggaattcatagggaagccgggaggtcccttccacataagagggattgtacacctgcttttccagggagagggctgccgtatttatgtaaaccttcgcatcgtcctgtcccggcttgctgttctgggcagtaaccgtggccacattcaccgcctcctggccgttgacagcctctgtcacctggcaccggaacacaatctccaccggaacaccagccggaaggtcactgataaataaatgccagcctctctcctgcctggtaagttcccaggaaatatccttcacataccgctctccatagaaatcctcattgatctcattgggcatatcctgggtaagctcccggaattcctccacctgagggggaatccccaaaactgtgatggcgtcctccccctctgccaggacaagccccgggggcaggttcagatcggaaatttccacattccgggctatggacagtcccggagccgtattttcatttgtcaccgccacccggtattccaccagatcccccacctgccattcataatggtccgctgttttctcaactgtaagggaagctgtgtttataaagattctggcatcatccccagtctgtggggcattgtctgcctggacaaatacctgattctgaagctccagaccattggcttcctggtcagcgatacagtaaaaccgaatggtgacagaggcctgggaaggaagataggcgattctggccgtccatccatttccagccctctccaaggacacctcgttgggtcttggcatcttagaaagaaccgccgtcccatcaggcacaggaatacccacgctttctccaatgtgatcaggtgtgacagaaatctgcacgccaccttcctcctgtaccagaaccagcccctggggcaggttcagatcggagatcaccacattctctgcaaccgtataatcctgtacattttttacgatcacctggtactccaccggctgtcctacttcccactcataatgatctgcgatcttttccactgtcagccttggggaattcacccagatctccgcatcatccccaatggatttctgctctccccagctgtcaagaaaattatccgcagtcacataagcggtgtttaaggtatcctttccattgctgtcctccagagcctggcagagaaagtgcacaaggatcctctccccggcgtagaggattggacaagtcaccctccagccgttctctcccacactgctgatggagggcgcccggtttcctccatccggcccggtaacctgccactggttattcatcagccgcagactgcctggaatgtcctcatctgtgatcaccacattccgggcataaccgtcctggcgggtctgggtaacctccacagtgtactccaccaggtcccccaccttccatccatcgtatttggcatccttttcaatgaccagatcgcatttcacaaggccagaaacccagctcacattggattgggcagtctcttccagcccattggcgtactgccaggtgagggatgcctggttggggatatagaaatgaaacccgtcctgatccatccattttcccagctcacctcttacatccagattgtttcttctgtgcacagtgagacaaaaggtgtagacctcctggtcaaagaaagcctccgtctccagatattctcctttggcgctgcacacaacgctctttcgcccctgggctccctcagtgacagacacctgaaactgaccggtgacattctccccgcttttatttaaaatctttacctttcccggatcatcaatatccagacactcctccagggtgtcccggaattcatacatcactaccgtcttctggggaacggtcacatgctggacaagataatcgaattccttgtattcattcatagcaaaggccgccgccttctctgtacaggttctggccttgttccagccgcctcccttttctcccacacgcttttccagacttgtctgcatcttccagttaccaatggccagcccagggagcatgccataatagctggcccgatagtacccggtactctgctttccgatcacgcactgcttgggagcgctgtcatctgtctggtaccgctccttgccgtcatagtgaaaggtgagagaaaaatctccattgtacaaaatcgtaagccacccattctcatccctttcatccagagcctggctgtctgaacggatggccgttccgttgtccaccacctggagatgaggattatttttgtttttgtaaactgcctggatattcgtggtgtccttgaaggaaaccttctggtctccgtccaggtccaccatagtggcatgtccgccgaaatccggcaccacttgggccatgggtgtttccgtgccatggagaagaaattcataccggaaggttgccgcctgcatggactgaatggtggtggacagcttgttcctgtagaacttgatggtgggcgggatgcgcttggtgccttccacgttgtaccagttattccgcggtccatggacctggacacaggtgacccgcagatccacatccatggactcctccacctgaccgtcagccccgaagattttataggtacccacgtttcggtaaatgataccgaagtccgtctttcctgccgtcacgggaacaataaaaccgttggccgacaccttttcatcccaacaggctgccccttgttcaatctccttctgggtcacatggtacggctcccctgtcatatttgctgaaagcccagggtcaaagaaatatttatccggatgaagggtactttcatccccctcctggacaatggctgccccgtgggcctcctcctgccagatctccggggcagctcctgctgccagaagaaccgccattatgaaggccattcctcttttcttcaataagtttcttttcatgttgttctcctttccaaacttaaatttttctgtaaaaacagaaattcccgagtcctggaaaaaaggcagaatgaaagacaggcttccctctgcgaataatggaaatcttgaatatttactttcgtttgattaattgaaaattttgaattaattactaagaattaaaggataataagaattttcgaaaaagataaatgaaatggttatgcccagtgcccctcagggcaaagccacatccggttcccatcaggaggaaccggaaaagggcatctatctgcgctttttcaactgggaaataacgaaaagcactgcacagactatgagaaccaccggaaccagtgcacttaagatcgtgatcagcagaaaaagaatggctgctgatatgaggatcacgatcaccttcccgtaccaggtactcagatccacgctggcaaacagtctcttgcggccataagggcggctctctccgacactcttgtcgtaggttcccgcgctgctgtcatagctgcggttatagtcacttccctgtgagccagtatccataatagtcttggcaatgagtctgggatcccctaactgaacaagaatctcctcctcggaacgtcctgcagctgtctgacctgcgatatagtcttcataatattgtacatgggacgcggcctgaataggtgtcatttcagcaagcagctgacctctgagagtttccagaaattcagttctgttcatgggcattttgtccttcctttatgatgttcaccaagttgtttattttattcattgtatcatacccagaaaagatagcaagtatttgaattctaaaatttttatgaaataactgataaaaacccactgaattattgttattatcttgacattctacacaaaaaatgataaaatcaattcataaaaattaaagatttctggtttaactgacggataagtggagtaccacaagggaatcagaaatcggtagatgccgaccgtctgggcagcatttgacttttcaaatgctgtccttttttatatcatgggaaggtccgtctcctgtgaaggaacgtccttgcagagtgaacatcttgttctgcagaacggtatctgcgcacaattctgaaaggagaaatcatagtatgggattcaaaacagacattgagatcgcacaggagtgcgaaatgctgccaatcactgagattgcaaagaaagcggggattgacgacaagtatctggagcagtacggcaagtacaaagcaaaaatcgactataacttacttcgagagacagataaacaggatggcaagctggttctggtaactgccatcaaccccactcccgcaggagaaggcaagaccaccacaaccgtaggtctggctgacggactgcagaagctgggcaagaacgttatggttgccctgcgtgagccatccctgggaccggtattcggtgtgaagggcggcgctgcaggcggcggatacgctcaggtagttcccatggaagacatcaaccttcacttcaccggtgatttccatgccatcggcgcagccaacaacctgctggcagctatgatcgacaaccatatttatcagggaaatgccctgaacattgaccccagaaagatcacctggagaagatgcgtggacatgaacgaccgccagcttcgcttcgtggtagacggcctgggcggaaagaccaacggaatgccccgtgaggacggctacgacatcaccgtggcatctgagatcatggcagttctgtgtctgtccagcgacatcaaagacctgaaggaaagactgtccaggatcatcgttggttatacatacggaaaggtttccgagcagaaaccagtgaccgcaggggatttaaatgcacagggagctatgtgcgcccttctgaaagacgccctgaagccaaacctggttcagaccctggagcacgttccggccatcgttcacggcggaccattcgccaacatcgctcatggatgtaactctgtgatcgccaccaagatggccctgaaattaggggactacgccatcacagaggcaggctttggtgcagacttaggcgcagagaaattcctggatatcaaatgccgtatggcaggcctgaaaccaaacgcagtcgtgatcgtggcaacggtacgtgccctgaaatacaacggcggagttcccaaggcagatctgaacaacgaaaacctggaagcactggaaaaaggacttcccaacctgctgaagcatgtcagcaacatcagaaacgtatacaagcttccctgtgtggttgccatcaacgcattccccacagataccaaagcagagcttgacctggtagaggcaaaatgtaaagagctgggcgtaaacgtggctctgtctgaagtatgggcaaaaggcggcgaaggcggcaagaagctggcagaagagatcatccgtctggtagaagagcccaacgacttcagcttctcctatgagctggaaggctccattgaagacaagctgaaccagatcgttcagaagatctacggcggcaagagagtggttctcacagccaatgcccagaagcaggcgaaagagctggaagccttaggctatggcaactgcccaatctgtgtagctaagacccagtacagcttaaccgacgaccagaccaagctgggcgcacctacagactttgaagtaacggttcgtaacctgaagatctctgcaggagcaggctttatcgttgcccttaccggagagatcatgaccatgccaggtctgcctaaggttccggctgctgagagaattgacgtagatgagacaggaaagatttctggtctgttctaaagtttgatccatcagaattttaatttataaaagcattcactcattacaaaaggaggcagccgctgatgcggtgtgcctccttcttattttcgccgtgggaccataccagctccccgctggtttcaatcccttttacaacgtcttggccctgtcgtggacgtttttacggaagttgatcacttcatggtcatatttttcatccatcagcttggactgcaccataaaatccgcagtggccttgttgatggccattggaatatcgtatacctgggcaatacgcataagcgcctttacatccgggtcatggggctgcgccgtaagagggtctgagaagaagatcacaaagttgatcactccttccacgatcttggctccaatctgctggtcacctcccagggggccgctgttgtatgctttgatccgcaggccggtctggtctgcgatcatcctggaagtggttcctgttccatagagatcgtgctttttcaaaatgtcaaaattttccttgcaccactgaatcagctttggcttttcattgtcatgggcgatcagtgcgattccttttttctcttcaatagtaaatgtaatataatcatcgttaatcataattacactcctttcttttcaaatgttcggctcctaaagccgtatcaacagtcagattctcatggccctgcccaaaaccggaagttctctttgggacagcgcactttattattataatggaattttccaattcttgcaagaacatgctttttttgccttgtatcagccctcgtaggaaaatacagccaccccgaatccaggcagatcataggaaaaggaagccttctgccgcccagtagaaactgcctggggatgataaacagactttttcttcttccccttcccaccgaatctggcctcatcgctgttcagcaccaaatgatgggcagtactcctcaacacacccactggatatgctttccactccaccggggtaaaattacaaacaaacagcagattattccttctgtcacaggagtggcgcacaaagctgagtacacttcggtcctcatcgtccggctcaatccaggtaaatcccccctccttattatccatctcatagaggcagggatttttccggtacaaatgcagaagggtcttcacatattcctgcatgcctttgtggagaggatcctcaagctgaacccagtccagttctctgtgctcgctccattcctggctctgggcaaactcctgtcccataaacagcagctttttcccggagtgacctatgaaaaatccgtaggcagcccgcagatttccaaactgtgcctccgggcttccgggcattttttccagcatggtgccctttccatgaaccacctcatcatgggaatagggcaggatataattttccgcataggcataggacatgccaaaggtcatattattgtgatggtattttcggtagatgggatcttttccataataagccagtgtatcattcatccagcccatattccacttaaagtcaaatcccagccccccgtcccgcacttcccgggtgatcttgggccaggccgtagactcctctgcgatcatatagcttccgggaactctgtccttcaccgccttattcagggtcctgagaaaagccactgcctccaggttctgattccctccgaattcattgggtacccactggcccggtcctctaccataatccaggtacagcatggaggacactgcatccacgcgcaggccgtcaatatggtattccttaagccagtacaccgcgctggagattaaaaagctgcacacctgctttttctcgtaatcaaatacctttgtcccccagtctgggtgctcaccttttctgggatcctcatattcatacacacagccgccgtcaaactttgccagaccatggagatcctttggaaaatgggcgggaacccagtccaggatcacgccgatccccaggcggtgaagataatccacaaaatacataaaatccttggggcttccatagcggctggtgggggcaaaatagccagtaacctggtatccccaggagccgtcatagggatattcagaaattcccataagctccacatgggtataccccatttccttcacatagtctcccagtgcatgggcaagctgcttgtaattatagaatccctccgggtttctttcactggagggctgcttcctccaagtgcccgggtgaacctcatagatcgccaagggctgctcctgaagcctctttctctcctgttgctgacgccacccctggtctctccacacatatcctgaaagatcggtgatcttggatgcagtgccgggcctgagctctgcctccatggccatgggatccgccttatagagccgttctccatcctttgtcaaaatacaatatttatataaatttccctggacagctccgggcacaaaggtctcgtaaataccagaaagccccagaggctgcatggggtcagcatctgcatcccagccattaaaatctccgatcacactcactgccgccgcatttggcgcccacacagagaagccggccccttcctttccatccttttcgcacaaatgacagcccattcgctggtataattcataatgtgttccctctccaaataaatactggtccaccccttcactcattgtcacttgttcaaaagtcttataatttctggcttccattaattccccacctactccctgcaggattcctttcttttatactttcaccgttggttccaatcatgtctttcttaactatacttgaaattagaccattggtcaattcgtacctggatattttgtctcccggatacagagaaaaaggagaagcgcctttcacagcacttctccctgccgatctttttaaacgttattctgcgcccgctcacgcatcctgggtatccatctctgccagcatattgatcccccaataatcatagaaagccttctggaaatgaatgccgtccgggtcatacagatcggaatgctcctcaaatacagaggtattgtctatgtaggaataacccttttcctcacacatggccttgactgccacgttataatccgggatctcccgccatttctcagaggtctcaaaggctggatccttggccggaaagatggaattcacgtagatatgagaattgggaaaattctcctggatcagagttacggtcttgtccatctcctgggcataaatctcaggggtgtcatacaagccaatgctcacatcattgatcccataacacaaaaatatattttccggattcaatgcctgtacctggggaatccggtccggaactactgcaatggtatttcctgcttctgcgaaaactctggattcatccaaaagctcatagaaggtaaatcccacacttctagagtctcccagaaccacatagtcataaaacaagctccagatggagacatctccggaagccagggcatctcttcgctcctgctttttaatctccttgatcttctccaaggtgggggccatgtccttctgttccagggctgtgagatactgaatgcctgcgctggtatctcccccagttacagttgcagctgggcggcgtgcggctgcaaagataaagattcccactgccatgaccagaacggccccaccaactcccaaatagagcttggtaagccttttctgcctgtcctgtgccctgtttttcccttgcccccaggaggattcccgggtctctgtgtcccttgtactgctccttcttcgtcgggatacagcggtttcctcttggatttcgtactcttcatccttttgtatccttcgttctgtggtgcgggtgcggcttccattcccagtcctggatcccggactgccggtctggaactggcctctattgcgtgtcctggatcccggatccccagtctgggtccgtggagaggcagagctgggcacagagctttggtcacctgactggacagactgtcttctggggggattggaggtccggcttccttgggaagcgccgctccccgttttgggccttgccccgctgatggtaggccatatattccccatggcatcaatattcgacccgggatgtccctgtctgtgaatggatgctgatgaagaaacgcccgtggttttctctggagtcctcctgggcgcattaacagactgtctattttcagatgatacgtttcttatctcttcctgctgttctatttgctgctcctggctttctctttgtgcagcatcctctgtgaaagaacgctttataaatggatttaacttcattgccatctgaggtatccttcctcttattttatcatttacgtgttcttgtctattttaacgctttttctgacaaaaataaatagtattcctcagaattctcggtttttttataaaaccatcgtacttctggaacaaagcacttcccatctactcacttatgagagcttgacagctttgtacacccatacatagctgcacagcggctttccttgacacattgtgtgcatccctgggagggttttgtcactgcgcttttttatcctgccagctcctcagctttatctctgtgtccagcatacatttctcataatgctcaatcttcccgttgagccgttcaaggcttgcctgcatatcctccatacgtctgagaagctgctctctttgctccatgagaatttcctttctggctgccaatgtgtggggaccttgctgaaacaaagccacatactcgatcagagcttcaatctgcactcccgccttacgcatacagatcatcagctcgatccactgacaggactcctcattgtaatccctgattccgcttttattgcggggcaccggaggaataattccaattctctcataataccgcagcgtatctgctgaaatatcatattttttacttacttgtgcgatcgtcatagtcaggcctccttgagcttttttttcatagtaacatctagagtggactctaagtcaatccctctatgggtactccatgttttttttcgcagatctgctttctatgtttccttccccgtcacatggatcaccacgtattctgagtggcctcctgttctcaccgcatatccccagcctgcaattccagcgctgacaataatatgataatcaccgatctccttcagcccgtagttcttctccactacccccagcagctctccaagctggcctgtgggccagatctgtcctgcatgggtgtggccggaaagctgaagatctacgcccagggccgcattttcctccagctccacaggctgatggtccaaaaggagaacaaactgctcctggctctgtgcgggcagaagctgttccactcctgtccggttccggacagcggagacatcctgtcttcccatgacccacacgctgcctcctgcctggacaccttcatcctccagaacctgaatcccctggtctctaagagccatctttaactcctgggcactgtagttggcagaggccacataggaattgtaatcatgattcccgaacacatagaaggttccccaggctgtgtccacactgcccaggatctctgccgcttcctccatctgtgccctggtggtatgttcgtcaaaaatatctccggtgagcagaaaaagatccggcttctccttttggatctccctgcagatgtccttcagcttttccccattcatggtggtccccatatgaagatctgagatctgcaccagtgtcaggtcctgctccaaagccttcttagtctccacctggtattgggtccttacaatattgcgcatgttcacagatccgtataaaagagccgcggccacaaccacaacgctgacaattccacttttatagagaaagcttaaggtgttcacagcctttggagatttcacagcttttctggccaccgcccataccacttccatgatcagattcacagccagaaaatacagcaccaccacggcgccaaagccatacactctccatccagccgccaccaggaccacaaccacagccccggacagcacctttataagtgttttcttttccttaaacggaaagagggagaaaaatctccgaaaccaaaaataaaaatatatgcccacaggcagatacactaccagcggcaggaaataaaaaaccacacccacgactccttcttctccttttccttacagttttgccctcatggccatccttatggacagaataccatttggagtttcctttctgtcaagactttttaactatctttcacaaaagtttcacacttcagggaaattgtgaagcttttgtgaaaacccctctttgtgtcttgacctggagcccactctaacccttataataggctcatcccgaaacggatgaacactttcatcctttcaggttatcccctaacttacagacagggccgcaatcgtctcgcaatgccgccctgtctgtacctccgaaaaattacaattgctctatgactgccccccgccgggtatgaaattccggcagggggctttatctgctgtatttaatcttctctgtattctctttggatacgggcatatacctctggaaaagggagaccatgttcccgggaaaggcgggccacatcctcatactctggataaactctctggccgttcatcaaggggcacaccttcaccctggcctgcccaagggagcaagtgattttgcgcacactgcgttttagaactgtgcgttccattttcactctgcgcacaccgatggttgtagtctcacgaaaaatgatggtttccagctttgggatatcctgctgctcacacaacacattcaactggtaggccggacgattcttcttcatatataccggaatgtaattcacatccctggcgccagctttctgcagctcttccataagatatcccagggcttcccctgtacagtcatcaatattggactccagcttccagatcacatccctgtcgtaacccgagggctttatgagcatggcccggagaatactgggccggtcgtaggttctctttcctgcccccatccccactctttctatggaaaattcctgtgggagctgctccatggtgcgcacggcagccgcaatggccgctcctgtgggcgtcaccagctctccctgagtgcctgtcacatgtatgggaagtccctgctgtgcagtaatatggacaaccgctggcacgggcaccgggatcattccatgctggcatctaacaaatccggttccctcatacaattcactgactgccccctgggtaatctccagattatccagacagatggcagcggccgcaatatccacaatggagtccacagctcccacctcatgaaaatgaacctgctccaggggaaccccgtgggcctttgcctccgcttcccctaaaatctgaaagatcctcctggccgtagctttggccccagctgtaagctttgagcggtcaaagatctcaaagatctcccccagtcctctgtgctcatgaagatggttatggctgtgtccggggtgggctgctacagcatggccatggctgtgactggcttcagcagcttctccctggccatgactgtgactggcttcaacagcttctccctggccatgactgtgactggcttcagccgcttctccctggccatggctgtgtccatgaagatattccatatcatgatcgtgattttcatgatgtctatctaaaaccacgttaaaatcgcagacatccagccctgacttttttacccgggatatgcgtatctcatacccatccagccccaggctgtccaagccctccttgagtacctgaggatccgcccccaggtccagcagggctcccactgtcatatctccgctgatcccgctgtagcattccaaatataacgtccggctcattgtttcactcctaatctgttaatctgtgttgcaatatatcctgcaccatagccattgtcaatattcaccacagcgatcccgttggcgcaggaattgatcatagtcagcaatgcggacagaccgtgcatattggctccataacccacggaggtgggaactgcaatgactggtttgtccaccagccctcccatcacactggccagagcgccctccatcccagccaccgctatcacgcagttggcactctggatcacctccagcctggaaaacagtctgtggatcccgctgactcccacatcataaatacggtccacattggcccccagatactccgctgtctgagcggcctcctcggccacagggatatccgcggtgcctgcggtgcacaccgcgatttttccaatacgctttttatccggcttttcaatcttaaggattctggatatgggatcatagaccacctggggatactgctctttaataagctcatattggcggggacaggcccgggttcccattacctctccctccttctcatagagttttccaaagatatgcagcaggtgttcatctgccttcccgctgcagtaaataacctctgaaaaaccagagcgcacctttctgtgagtatccagctttgcataccccatctcttcaaaaggttccctgcggaagtaaagctctgcctcctccacagacagctccccgttttttactttttccaaaacatcctttgtctccattgcgtcctccattgccatcctgattttgtctgtgcacttttttattgctctttctactttaacccctggagtgcactccaagtcaatactgaaatcctctcttctgcccttttcctaaaattgctgcagaggcagcgcccctgcagcaatttccgtgtaaactgatctttttctttcttgatttacggagcttcctccactgccacgatccttccgtcgccataaggctcggcatattcctcacccactacgccgcttaggttgtcggtgatgtaagtgatgagaacctggttgtccagcatgatatcctccaggataagagggcattcctggaacatattcaagccgtccccgccatccttaagaaggtaattatgagaagccacggtgtaggtcttctccagatccagatcttgaccgtccacctttacatttttcacccggtattctccgtcaacaccagtaaacattccattttcgtccaacgtgacagaggaatccagatacgtgtgaatttcataggtaaggcctgatacctgaaggaaaccgccggattcctcgggaacagccatagctcccatctccagggcatctaagatctgctgcccggaagcctccaccatacacagctcatttccgaaggggtgcacactgataatgtcattgtatgtgatatccccttgtaaaatatctgcccggacgccgccgccgtttacaagagcgatatctgctccggccacagcccggtaagcatctgcacacagatctccaaggttcgtctctgcattgcgcaccagtctgattttttcctccttatccagggtggaaggttcattgatcaccaggggtacatccgtctttgccacaacctcattgagcacttcatcaaactcagaggtgatgcctttgatgtattcctccgcctctgcatccgaggggatgtctgcgctcaccagctgtgacgcaaaggttccgtctccgcttatggtaagctttccgatggctgccagcttggtacctgtggaagtgagaagaacctccttcccctccttatttttcaccttttctccctcaatggtgctgtgggaatgaccgtccagaaccacgtcaattccagaggtattcacgatcacatctgaggaggtccagggactgcaggaagcctcgatgcctaagtgggccagggcgatcacataatctgccccttcacttctggcactgtccacagcctcctgaacacaggcatacagggcacttccatcctgatcctgctggaaaccgtagatgaattcccccttatcgtcctgaaaatacttgggcgtggaggaggtgatggtcttgggcgtacaaatgcccacaaatgccacctttttcccattcaagtccagaatcttataggcgtcgaaaaccggcttgtcctggagcaggtctgtgaaattacaggaaatatacgaatattccgctttctttgttagttccagaaaattctccattccatagtcaaactcatgatttccgggaatggctatgtcatagcccacgttattcatgatgtccacaatgtagctgccgtctgaaagagttccgatggcttccccctggatggcatccccggcatccaccagagccacagcccctgcttcctcttccatctgtttcttcaatcctgccaccttggcataacccagaacctgactctcctcatcaggcaccactgcacagtgcacatcgttggtataaagcaccacaatgtccccctgctcctcctgggcgctcaccgggatacagcttcctgccagcagccctgttaccagcaatcctacaaatagatttttcttcatactctctcctttccattcttcttttctgaaaatttgtaccactggtactattggtactatctattataggagaatttctctgaattgtctactataatcacatcaaaaatctggcccagccagcaaaagtatggatgaaattcatggttgtttcttttttcttgcccaccacctgagccgtctttccctcaggtgccagagaatgctccaaatcctgaaccaccagcgcctctgcctcatattccctcatgtcagaccgaagctcctgatttacccaggggctgtcaaggaccagcataagctctgtgtccagataggcgctgcgcatatccaggttaaaggaacctaccactgccaggcggtcatcaatggtgaggcattttccatgataggagattcctccgtcatactccaaaatctgaattcctgtgtccaggattttccccttgtttgcccgatagtccatggctccaaagggatttccattgttggcaatggagttggtcatcatcttcacctggggaacttgctcacagacctccttgatctcctccagcatccagtcattgcagatcacatagggagtgtgccacaccacctgactgtccgcctccttcatcaggctcaccaggtcataaaatgccgttggctcttttgcccatatatgggtgggattgttcaccagccggatctgatttacaggccctgttatctgctcataatccttttcctcaaaccatccgggattttctttcttcatctggttataatgctcttccagctccaatgccgccttctccactgccacggtcttcctgatgaaaaagtccctgccaaaggttttgcataccggaagctcccacactccctcaaaataggacacaatctggccaatggaactgccgtcggctgactccccggtgttatacacaagcacatcccagtcataatttttatagccgggctggcctcccaggaaaaaatcataggtatttcttccgcccagaatgtatgccttctcgtctgcgatcacatatttatcatgcatcctgcccataaaagtccagggcttccacacccggatgggattataagaccggatctccacgttgggctccgccgcaagtgcatagaaataaggatttccgtccatcctggtcatctcccccatgccgtccacaagcacagagaccttaacgcccctgcgggccgctgcctgaagggcactgagcatattcattccgctgatatctgaccggaactcaaaggtagacaaaatcacccgctccttagccccctcaatgagacgcagccgttcctccagggcttctccgttatctgagattacatgggccctgtcctttgagcttttctccccgtaataatcctctttatgaaaagcctcccgggtggtttccgaaatcttcgggtgccttgcaaagggcacaatggcacctgccaataaataaacaataatgaatagaaccgccatccccacgattttccccatggatcttttcctctcctttacagcccgtttacaaacttcatatttccacatgcggtaatacagcagtccataacagatccatgaaaaaatcatcaccgctgcacacaggtacacgaaaatattgacagtaaggtaggacaactccggcaccaccaaaattaaaaataaggccacatccaagaatgctgtacaaattttcccataccactgggctccgttcatccggtggccttttctcatcatccatgctcccacaaccgccataaaaagctctttgcatacaaaaatctccacaatgaacaccagcttggggtaccggaaggtaaaactcaggaaaagaattccatgagtgatcttgtctgctatggggtccagaattttaccaaactccgtgaccatatgaaaccgtctggcgattttaccatccagaaaatccgatagaaatgacagggccataattccagccgccacataataatctctggtggaatctgcataaaaatacacatacagataaaccggaagcagcaatatgcggaaatagcccataagatttggtattgaaaaatattcccgtcttgtctcctttttcattctccctatgcactccttttgttgccgtctgccaataagcaggaaccttcttttcttcctatatttaagaaaacattatagcacattttttccactgaaggatagaaatagaaaaatcaatcgtggcgttcctcctgattttgataggtttcacaaaatctggcggcaaaggcaggtggttctccatgggcatacagatgggaaacatctccataggagctcatgcggaagctggcaatcccctctctgcgctcttctgtgacaaccgtggtcacggacgagggcgctgcgcacagattgtgcaatagtaccatgggagagatgccaagaaggtggctaaggagcacacagcccactccaaaatggcagaaaaacaccagggtgtcattgttgggatttacggcccggtaaaaatggccttcccgcaggtaaccatggtccttgagcaccttatccagattttctgtgacccagtcatactcttcttttacttttccctcttccagagaagagaactgaaaccatctgtcatagtgataaaattcttcatgtacggtccagtcctggggaagccagtcccaggggatcatctttttatccttcacatccggcctgtggatctgcacatcaaattctctcagccatttacattccacagctgtccggtttactttttttaaagtgcaggaagcggtatccttggcccttcctaaaggcgatacatagaactgcttcacctccagctttgccagtctctcagacagatattctgcctctctccatcccttctcagtaagagaatcaatggtataatccggatccccatgtcttacgatcaataacttcatcttatcctccatatacagaaaagtccacggtagaaacaaagcgggcaagcccgcttcaactccccatcccctcactcatgaggggcttggcagctttgtgcgccaatgtgcagctgcaaagcagctttcctttgcacattgtgtgcatcccccggagggtttttattacataggaaagttcagcgaactttcctgtgtaataaaaaataaccgctggaaacctagatttccagcggctgttccgtgcgttagaggattcgaacccccggccttttggtccgtagccaaacgctctatccagctgagctaaacgcacatcctgcgaatcaccttcgcaacaattggtattatatagcatcctctattggaagtcaagggttttttcaaaaaaaattcttaaccggccatggctgtcacggcctggcagccctgctgctccggcctagtttctccggagcgcctcaatgggactgagcttggcggcctttctggcagggtagattccgaagaagacacccacggcgcaggaaaacagggtggctgtcaagatggtggctgggctgattcccgggctgatggtcatttccatgctggcactgatcacggtacagatcccataacctgccgcaatacctaagagaatgccaatcacaccacccatgatggtcagtatggctgcttcagccagaaactgaagcataatggaagaggtctttgctcccagtgatttccggatgccgatctctctggtccgctccgtgacagacacaagcataatgttcatcactccaatccctccaaccaacaaagagatccctgccacaaaggaaataaaggctgtgaccattcccaacatgtcattcatgctcttcatcacatcctggaaattctggatttgaaaataatcctccccggcgctttggtggcgtttttccagaaggtggaccaccttgtcggcaaccgtctgcacatccaggctcttatccgcctgcacgttaatgctgtaaaaatagtccatatcccccaccagatcctccatagcggtgtagggaacattcaggtaaatgggcatcccctcataggtatagctcacaaaggttccattctccttctgggtggacactcccacaatacggaaatttttcgtcatatcatagcaggtgatatccagggacatccccaccacatcatcggttccaaacagacgcttggcatcagtatctgtgagcacacacacatttttcccctccagcacatctgcctcggtaaaatagtttccgtacttcatcacatcattgttaatcagcttggcatcctgggtctgtcctgtaaccatcaagttaaaatttccttttcctgtaaccgtctccccactataggtatcagacatatccacgccctccacctcatccagctcccggatggcctggacatcctcatcggtgatccacacctcatcggtctgggcagtatcgctgcagtaaatatagatctgtcccccgcccacatcggagatctcactgttcatctgattttttgtaccctcgccgatggatacaatggcgatcacagaggcaatgccgataatgatccccagcatggtcaaaaaagatcggcccttgttggccataatattctgtacagccatttttatgtattcgtaaaatttgctcattcttcctcaccgcccccgggttccaccgctggctgggcctgcatcccttccatcaagccacccaggtccaagatcacctggtctccctggacaagcccggactttacctccaccatatctgtagaactgagccctgtctttatctctcttcttgttatgatcccctcctccaacacatagcaaaaagagccgtcctttccaatattcactacctgggctggaatgaccagaacatcctttgcctgggctgcatggattttcaccttggcatccacaccgataaaaatattttcatccgggttgttgattttcactgtgccgccaatgacggggcttcctttttcattttttgtggcaattctactgatcttggaaaccgtaccttcataatgaaaatctcccatggtaatgtcagccttctgtcccaccttcaccttgtcaaagtcatatttggaaatatttacattcacgctcacatcctctgtgctggccaaggtaagcagttccatgccctgggtaacagccgctccgctggatgccgccgcttgggatacaactccggtaaaatctgcctgaatgcctttctttccttcctccaccatctctctggcagcctccacatccatcttagaaagctcattggcaatattcagcttctccttctcttcctccgtcagggcagcgctgtctgcctcggcaatggccttcttggatgccagatcactctgcatctgagccagcttgctgcttgccttttcaatggcagcctccaagtccgtggtatttcgaataacggttggtgtacctccctctcctgtaccggaggctcctccggcaaaagcgctggtatccatggaaggcatctggggctgagctgccttcttctcttcaaaggcattccgggtctggtcccttttcatctctgcctcatttctagtctgcagggcctgctccacagctgcattgttttccagactctgatctgcctgccaggtgataaaagccatttgataggcggaatccgctgcgttatactctgccacagcctggttataatcaaactccaggatccccagctccatctcatattcaggaagcgtctgctgctggtattcctgaagggctgcctgataggctgcgtctgccgcctcctgagccgcccgggcctgtgcctgggcctgggcggcagctgcctgggctgcattgctggcatccacctggctttgaatgttactgttggccagctgttttttcatatctgccagataggtctcctgctgcttcaccttctgctccagctcctgcacctgggacttggcctcctcttgctttgtcactgaatcctgggatttcttaatggtattctggtagtccgcttccccggaacggctggtcatctccgcctttttcaggctatcctccagatccttaatatcaaactctaccatggcgtctcccgcctggacagtatctcccatctggaatttcatattgaaaatttttccgtttacaggtgaaaaataagttttctcctgatcgctcacaatggagccgctggcatccacctgctgggctacgtctcctctttccacagatgcggtcattacctggggcaccgtgtcttcccggggctgcatcatcccatggatcttcagacctccccccagcaccaccgctgccgctgcggccaaaataacaaatttctttttcccctttttcatgcctgtgcctccttgttcctgcttggaaaatgttcgtttatgtaatcggattcaattttgccgtccaggatccgcactacccgcctggcctcattggcgattccattgtcatgggtgatgaggatgacggttctgccgtcctggtacatttccttgaggatcttcatgatctccttactggactgagagtccagatttcctgtgggctcatccgccaggattaccggcggctgggcggcaatggccctggctatggccaccctctgctgctggcccccggacatttcattgggcttgtggtgcatacgcttttccagccccacctttttaagagcctccacagacagattcttcctggtctttctatcaattccccggtagatcaggggaagctcaacattctccaaagccgtgagattggcgatcaggttaaagccctgaaaaataaagccaatctctttatttcgaatatccgacaattcattgtccttcatatctgccacattggttccgttcaaaaaatactcaccggaggtggggatatccagacagcccagcatgttcataaaggtagattttcctgaaccggactggccgatgatggccacaaattctcctttttgaatatccaggctcacatggtccagagcccgcacttcattctctcccggattataaattttgcacatatcgatcactcgtattaaaggttgttgcattttttttccccttttcttttataactcttctgtctgccagcaaaccataagaataaagcggacaagcccgcttcaactccccatcccctcactcatgaggggcttggtagctttgtgcgccaatgtgcagctgcaaagcagctttccctggcacattgtgtgcatcccccggagggtttttattacataggaaagttctaagaactttcctatgtaataaaaagacagcaggagcatcccggtcatccaagaaaactcctgctggtcatttcaatccgtcaattgatcatctgtgcctgcttatttttatatgctcccagtaaataaagggccggaagcaaaagtcctgagatcacgccccccatattgaactggccgaaaaaagcctcataaacggcttctgccaagatttcaactacaagggcaatgcccaaaatcaaacaaattttagccttgtcaatttcattgcagtattttactccaaggatgccggcgatcatataggtcacactggcaatcccggacacaagtccgctgatgagcatcatggtcttggtgacaccctcctgcttcatagtggccgccagctcctggctggaatccacggaggtgaaggaggcaaatgccattgctgctgaaaaggccgcaaacacgcctaacacaattaaaagaatccccactgcctgcagtaacgtcttccctggtgcttgttttatcatatgagttccccccgaaaaaaattttcccaatttcacaccctactatattagcatacttatgaaaaaaagtctatttttccagtgaggttctcacaaaatataacgctccagcctttctgcaggcttcaactatttttaatttttactccattttttccaaaatcatccagtcaggcattggcaagaaaggcctggtatgccttcttcgcctcataaacatccgccttactggtcacttcccagggagcgtgcatgctcagcacagccacaccgctgtcaatgacatccatgccatacagcgccgcgatataggcaatagtgccgcctcctccaaagtccaccttcccaagctctgctgtctggaaagctacctgactgtcgtcaaaaattctccggatcagccctacatactctgcatttgcatcatttgagccagattttcccctggaacccgtatatttatttaggacaattccccgtcccagataagccgcatttttcttctcaaaggcatctgcataagccgggtcgtatcccgcactcacatcagaagacagcattttacagttccttaaggtacggcgcagagtcatctcgctatagcatcccatcacctccaaaagctctgctgtggcgttctcaaagaaccgggactgcatgcccgtggcgcccacgctgccaatctcctccttgtccaccaaaagacaacaggcggtgcgcttgggcacttctttaagctccagcattgccaaaagggaggtgtaggcgcacactctgtcgtcctgtccgtaggccacgatcatactcctgtccaggccgccttcccttgccttgcccccagggacaatttccagctctgcggagaggaaatcctcttcttccatgtcatatttctctttgaggattttcacaacattggcctttacagcctcctttttctcctcgtcaggcaggtcctttaagggacggcttccaatgaggatatcaagattctccccttcgatgacctccgctgccttcttctgaagctgacggcctgccaaatggatgagcagatctgtaatataaaccaccggatcatccatatcctccccaatggtgatctccaccagggttccatccttcttagccaccacaccgtgaatggccagaggaagggctacccactgatatttcttcacgccgccgtaatagtgggtgtccagataggccaggtccgtatcttcatataaaggattctgctttaagtccaggcgggggcagtcaatgtgggcgcccagaatgttcatcccattttccatggcatcctgtccgatgtgatacaaagccacgatcttctccatccccactgcatagacctttgctcccggttttaagacctctccagccttctgacactcctccaaagagcggtagccctgggctctggcctgctttacaatttccttcacacattctctttctgtctttccttcatccagaaagcggcggtagcctgctgccacctgctccagctcttgttcttctttttctgtataagaaagccatgcatttctgcgttccatgttttctccacctttccagttttctattctatcttttccatttctatgggatattatagaacacttcccaggttttttccacatttggggagaatttttatttccacttcagcagctttccaagtatttccttctgggtctggggatcactttcgtcaatacacagatagattcccttggggctcatatggttcatgaactcctccagctcagatttctgaaggtccaccaccacactttttcccgcatcctggattttcttaatgagagggcaccactgcatgatgggaacattcgtccccatcccctgaacccactggatcgcctggatctctttgatctccagcagggcatccagatgattggctaccccagggccgtccagatggaaaatattatgggggtacaaggaggtctcctccttcacatagggaagctcatattcattaaaaaagtccttggagatcatggccccgaaatcgcagcttgggatgtgcattccctcataggaagggatattcatccaggtcacagacacctggtcatggtcccgcagcaattggtggaattcccccatctgctcctgaaaagaagcgcagcatctctttagcagcttctttacaaactccggttcatcatacaggtcataacacagctcctgggccccccggaatgcggcagcacagtccattccagagtgcatatccgtataccccaccataaaacggttcttacatctggaaaatgcatactccataagctccatcatcttcttgtaatacttggagtccctgcggaaataaattttttccaggtcctcctccccctctacacagggcagcatccaggaagtaacctcgccaaatttcagctcacctcccatggtggctccgtaatagttgggacctaaattgggaaaatataccggaaaggtctctccctggaagctggagttttccagggatttgatgaatttctccacctgatattctgtgtcaaaccagcgctcctgaagagacgcccatttatgattgtcatccagcacattgtattctgcattatgagctgtaaaccgcacaggaacccggtcaatgatctcctggtcataccaggcatacacccgcttcatacattccacaaaatctggctttgtctccagttccatatccctaaaatctgtcatctgttcaccctcctgcattttcatttagacaacctttcttttcctgctgcggatatccacagccacggcaatgagaagaaccaggcctttcaccacccgctgccaatattcgttgatattcatcatcatcattccgtttgccagaacacccatgaagaccacaccaatgatcaccttagtgattttcccttcgcctccgctgacactcacgcctcccagcacaacggctgtgatgatatccatttcataaccgtcgccggagctgggctggccgctgttcactctggacatcaggatgagccctgccaggcttccgaacagtcccaccagcatatagattttataaatctctttttttacatttacgccggagagtcttgctgtctccgtgttgccgccgatcccatagatccgccgtccaaacaccgtccggttcaggatcacatagccgatcacgaacacgatcaccatgatgatcatagatataggcacgatcccaatatttccctgtcccagtaccttaaaggattccggcagtccgtacacaggcattccccctgtcacaaggtagacggcgcctcttaggctgatcatcattgccagggtggtgatcataggcggtatttccagataattgatgcaggtggcgttcacggccccgatcagaagaccaatggccactgccgccgccacggctgccacaatgggcagtccgctgcgcatcataatagccgccacggcagaggtgataccgatcagggaaccgatggacagatcaatgccgccggtgatgatcaccatggtcattcccacagaacaaatgcccacaatggaaatctgtctggtgatattggcaaaatttttcgctgacaggaaggaccttgtcaccactgaaaaaaatatacacatgaaaaccaaggtcaggataatgcccatgtctccccagtttatttttctttttattctttcctcattcatttcctttcgcccccgttttctgtttcatagttacccatttgaagccagctccagaatatgctcctgggtcatttcctcttttgacacctctcctgcgatgcccccttctgccataaccaggatccggtcgctcatccccataagctcaggcagctccgaggaaataatgatcaccaccttgccctcccgggagagcaggttgatcagctggtaaatctcctgctttgctcccacgtcaatgcctctggtaggctcatcaaaaataataacctcacagttcatgagcatccactttgccacgatcaccttctgttggtttcctccgcttaagtggctgacaagctggtccctgctgggagttttcacggtgagctttttaatctgctgatcacagagctgtgtggcccttcttctgtggatcaggttcagggcattggccagattgggaagataggaaaagagcaaattgtccttcacggacatgttcaggaacagcccctgctgctttctgtcctctggaagataggcgatccccgcccttatggcatcctctggggaatgaatcttcatcctcctgccatgcatatagatctctccccccagaagcttgtccgccccgaaaacagcccgggccgtctcagttcttccggctcccaccaggcctgcaaaacccaggcgttccccttttctggctgtgaaggacacgttctttaaaagctctgtggaaatattttttacctccagcaccacctcgccgggctccatatccagcttgggataggaatccttgaagggacggtttaccataagacgaatgagctcctcccggtttgtctctgccaccggcttggtacagatatattttccgtcccggaaaactgacaccttgtcgcagatctggaagatctcctccagcctgtgggaaatatatagaaccgcaattccctgctcctttaatttgcccacaatatcaaacaaataggtcaattcattgttggtcaggggtgcagagggctcgtccataatgatcaccttcacagaccgggacagggactttgcaatctccacaagctgctggtatcccacagtgaggtttttcacaagcatggccggatctattttcactcccagccgctcaagtacctcccctgcctccttctccatcctcttaaaatcaatcagcccgcctttcatgggaaatcggttatagtaaatattctcagccacggacagatgcttcagcaggttcagctcctggtaaacagccgtaatccccatgtccagcgccttctggggattgtttcccacaacctttcggccctggaagtaaatgctgccctgtgtgggctggatggccccggtcatgatctttatgagcgtggacttccctgcgccattttcacccacaatggcatggacctcacctgggtaaaaggatatggacacatggtcaagggccactaccccagggtatttttttgtaatgtccttcagctccaatagtacactgtccggcattttctccccactcccttcttcaaagaaaaaggaggaccgccaaagagtcttgatgcagtcctccatacctgtcataagttacttggctatctcgtaatccccaatgttgtctttgcttacctgcttcatatcatatacgatctgctcttcaatgggaccatccttaattacctgctccacaatgtcaaatacctggtttcctttttctcccggctggatgtcaaccgtgcccttgtacatggtatcctctgagatcagctttaaagcctcatccagggcgtccagtcctacgatacaggtattgtccggcgtatgctccttgcgctgcatacaggcctcgtacacacccagggcgctggagtcattgatacacacgaacatggagatctccggatttgccgtaagggctgtctcagccaccttaaagcctccgtccgcgtctgccgcattctgctctgaaacgaattcaatttccttgtctccggtgtaggtgtctaatatcccctgtttcagaccctctgatcggtcgatgagggaggcgatcatatcatagcgcacaacccctacctctattttcccctcagagtccagaatctcatcgattgtcccgtcctcttccttctcattgagccagtttcctgcaatgacaccgcccatttttccatactctgcctcgtcaatgccgaaaaatgcgtctgagccctccaccttctggtccagactgatcaccgggatcccggcttcctgggcttccttcactgcatccttgggcgcctcctggtcaacaggactgataatgatggcatttacctcctgggaaataaaatcctcaatctggctgatgtgtttggaggcatctgccgccgcatcggacacgatgagattgatcccccgttccttggccgcttttttcatgccgtccacaatggatacaaagtaggcattctccatgctctgtaccgtatagccgatggtgaggccgtcatctgccaggacacttcctgcacctgccatcaccatacttcctgccattgcagcgcacagcgcacctgttaataatctctttttcatttttaattccgcccctttcgtgatttgtttgtgtctttattatataaaaaggccaactaacagacaattcactatcctacgataatatttttatatcctacgataacaaattgtgctgagttgacctattttttaattccccgaatgaacagcacaatgcagggtgcctgtacattaaacaggcacctgggctgtatgtcagcgaatattctttttgtactggctcaccgtgactcctgtatattttttaaataaaatgctgaaataggacgggttgtcataccccaccctctgggcgatctcctggctggtgtagggagaatggaccagcagaagctgggcctctctcatgcgcatctcaatgagataaccggaaaagctctgtcccatctcctctgcaaatagtttgctgaaataattggggctcagccccacatagcgggctacatccgtgatgcgaagctgaggctcacaaaaatgctcctccagatattcacaggcccggcgcaccagattcctgccggacaggtccttctgtctatttatccgctcaccaatggacagggccatccttaataacacctccatggcctcgtccagactgttttttcccatgatatccgtgtacattctctgataataagcttccttaccttccgtttcctccagaacgtcccccagcccctcatagatcaggctgacggcataggacagagccagcacggaattatttcccgcctcccggagattttccttcagcttatggacatactcctgaattccctgcgtttttcccatacagatcatcttcaccagataatccaccagggccctgttcagcacatgcttctgactctcatattttcgaatgtccttttcttccagatccgcgcctctgccttcacagaactgatactgccggatcttctttattttttccatagacttgtgaaggtccagggcatctgacacaattcctccatttagaaaggccaggtctgctcccttcatggaacgcacctgttctgcgcaggcctccttaaattcctttcgcacctgttttaagttctcaggggcatggcacagaaccagataatggttccaggactcctccacacaatagaacccccgctccttagctgagcgctccaccgctgcccctgccttggaacaggcctcctgtgggcactgagggatcacctcaaccacacaccattcccctgtgttcttctgaagaaactcctctccctgcttccgggcctcctccggctccagctttccctccagcaggtttacataaaacatccgttccctgtatttccagttttccttcagagacctttccatggcctccttttcctgtctgtccgcctccagggcctcaagccgcctcttggcacgctccatcacttcccttaactggtccaggtccactggctttagaagatagtcgatggccccgtgcttcagggccttctgtacataggaaaattcctcataggcgctgagcatgatcacaggaaaatccgggtttttcctgtgaatccgctccagcacctccagtccgtccatgcagctcatacggatgtctgtgagcagcaggtcactgcctgtctcttcaattttttcctccacgtggattccgtcatttaaggcagcggccacctgaatccccatctcctcccagcagaccccttgcgcaagtccctgaagaaggatttcatcatcgtcagcaatcaccagcttatacatgcgcttcctccatttttatccgtatggtaatctctgtccccatccccttcctgctctccatctccagagaataccgctcccggaagaacaggtgaaggcgctcatttacatttacaagaccatagctgtccctttggtccaccttcatggagaagatatcctcctgaaggctctgtaactcctctggctccatacccacaccgttgtccttcacacgcaggagcagatatcccttttgaagaaagcaccacacaaagatcaccccgccctcctccttgggcttgataccgtgatagatggaattttccaccaggggctgcagcaccagcttgggcagcttcacctcctccacctctgggtccaggaagatttcatacctgagctttgactgatagcggagcttctgaatggccagatagctggatacattttctgtctcctgcttcagggaaataacgtcccggcccttattcaagcccgtcttaaaaaagttggtgagggcctggagcatggcctgtgcatcctccagcttttttatgcggatgagccacatgagagaatccagggtattatataggaaatgtggattgatctgggcattgagcagcatcagctcataatttcttcgaatctcctgctcctccacgatctcatccatgagctttcggatatctgacaccatcttgccaaactgttcactgagctccccgatctcatcctcagaggccttcacgatctccacgtcaaaattccccttctggacacactccgcactttccttcagctccaaaatgggccgggtgacatttcgagccgcccgcctggaaatataaaaggccagcaggatcaaaagcccaaaaatccccagataattcaccgcacttacatagaaggcccggtaaaactctcctcttgggatcccgtttaccaaaatccagtcattgactggtattttctcataggcagtctcataggactgttgagagtaaaagcctttctccggaaacgtggtctcccagtagggaattcccttggccacagtcactgcctggtcataggctttcttttgtactcccttgcgggtatcttctgtgagcagggtgatcttctcatcctcatactgctttactctctcatcctcaatactcagcttcgtgttgggattgtacagaaataccacgcctcttccataggcatccagattctggtataaaatctcatccacgcacacctccaccagaagaactcccagaagcgtccctgtggtcttgatgcccatggggattcccacggagatataatgttttttcaaggatttcatcacataggaatcttcatagagatcaaaccatatctgggtgtctgcccccaggacccgctgataccaatcctccttttgaaattcctcctttagaaaggacaggggactgcttttgtatttccggccagactgggctaagatgtaaacctgaatattttcatcaaaataagaggaaatcttcatcagggaattgttgatggagatatcctgttcactggtcttgctgccaggggaagacagatgattaagggcgtccagtatttccttgtcttcgctcaccgtctggccgatctgcagggcctcccggagaaccttgttgagctgctgggaatctttttccatggttgtcatcaggcttattttccggctctccatctggtccgtgagcaaaatggtgcccatgccgcctcctaagatcagcacaggaatgagcataaacacaataaaataaaagaaaaatttattttgaatctttttccccttaataaccctgcatttgttcaatatcttcattggtatatccctttacgctaagagtgatcaccttctgggtatccattcccttttgatcccgaaggatctgctccgtgagtttttctcctatataaggctccacgtctacgcagccatagtaaagcccggactccatggcctttttcacatcctggatgcctcccacggaaatcacagggatattcccagtctggttcagagtttccagcgccgccagcgctcccatccccgcctcgtcattgtgggcgaagatggcgtccacctttctgctcccgtcaattaaataggcgatcacctcattgtaggaatccatccgtttgtaggagccccgcagtacgcactccagctccagattggagtaggcgcacagctccctgcgaaatccgatggaccgttccttcgtggaggagcttccgttctcgcactgcagctccaggatccttttctctccctctcccagcctctgggccagaaggcgggcgcacagctccccttgaagctgcggattttcatcaatcctcaagaaaatatccttgtcctggatccccgatacctcacctcccagcaaaatgacctgaatgcccagggctttggcgtcagagagaacctccgccagcccgatggactttacaggcatgacgatcagatactccggccggccttctgtgagggcctgtacatctttgatctgctggcgcatactgctctgggcggacatccattggacagaaatgtcttcttttttcaaattgtccaaaatatcctgaaaaacagcaacattccagggggccgtggtatctgacatggagatccccacctgaaagctctgggaagaagggttctcctgtcttccgccccaatagataaacactccggcagcaaataaaagtatcactgcaagaaaaggaagaagctgcagcagcctgatcttttttctattttccacgttttcttctcctgcacatcacggatctcttctggtgggtgacattgtcattacaaactatattccagccgttcttgtacctgcttcccatcacggatcccctgtgttgcgcctatacattccacggccagcgagccgcaagcatttccccattttgcacaggtaaccagatccatgtcctggcacagggcatggagaaagcctcccacaaagcagtccccggccccggtggtgtcaacagccacaattcccggcacagcaggaatccattcctgtatttgagcgtttctgacataacatcccttattcccggatttgatcactacatttttcaccccatactgcaaaaacaggccgctgatcttttccacatcctgctccccagtcaagagggcagcttcctgatcattgggcagaaggtagtctatgaaaggcagaagccctgcaaggtcctcaagggtttccccattctttctttttgtcatatccgcgcagacaatttttccttggtcctttgctcttttgaacaaggtctccatatggctgatcccaagcctgggggatacaaacatactggccaagctaatgatctgcgcatcctttggaaatatctccggcacatgaccaagatccagggcccgcaggctgctgtgaggatccgtgaggaaattccgctctccgtttttctggaccaggacaacgttcacactggtggaaaggccctcctgccaggtgacatactccatggaaatcccacaggactggcagtgtgccttcacaaactcccctgccagatcccttcccagcacggtacacagatacgggggattccccagccttgccaaaacggtggcttcatttaaggcatcccctcccgtggacatggaaatatcctccgcggcacaggagcctgtgtcaaacacctcccgctccactggtcttgcggctgcatccaagattgccgcccccatcacaaaaaccttcttgctcatatctccttctctccctctataagatgaacttctccgtagaacactgcctcgtcttcatcttgctcattttttaccaaaaggctgccgtcctccaagatcgcaagagcctttaccatccgctcttttcccttctgctttaataaaaccgctctgccagggatcagatttttctctctgtacacaggacagacctgattatgctccgcctcctccagcaaaaatccggcaatctccgctgccagacggttcctgtcaatgtccggcttctttcccaggaaaatatttccatccccgctgtgtaaggcgccgtcttcctgcctgggggcatagagatgaatgcccatccccacaacggcaaaatcaatctctccggtctcgaaatccgtcacggcctctgtgagaatgccgcagacttttctgcctttataaaacaagtcattgatccatttaatatccaaagaaaccccgcagacccgctccactgccttgtacacagcaaccgctgccgcctgggtgatcagaagactctgggccatggttttcttggggcgcagcagaacactcatgtacaacccgcagccctggggggaggaaaaggaacgtccgcttcttccctttccctgggtctgctgttctgccagcaccatggttccatgaggtaggccagggccttgggtgagagccttctccttgagcacatcattggtagaagtgacctccttgtacacgaaaatctctccctgacaggccttgccccagctttctatggactgggcgcagagaatgtcattctcctgctccatagcatagcccttattggtcccggaggcaatggcatatccctcctcccgaagggcctttactgccttccacactgctgcccgggagcagttcagccgccccgccagctcctccccggaaaaaaagctccccttatcttgtgctaatattgccaatacctgtgattttacagacatcctgtctctccctgcttccttgtttcttatgttaatttcctataattggagctgatggacacgggctaatccagctggtatagaaagttctcataatcctttacataaagctttctgttttttcttcccctctccaggatctccaatccttccgcctccagcttttctctctgggcctcaactcccccaggatatttgggattcagctccccccttgcctttaaagtcctccagtagggggtggggtcctctgctctttgctcgcttgcccaggcggcaatggaaacaaagatccccgctgtcatagggtccgtgaaatcagcgccattttgtctggcgaaataatcccggatctgtcccacagtgatcaccttgccctggggcacctttttcataatctggtcataagcaaggggaggggcgaaaaacattttctctcccccgtattttttaatggctgcctggtccgttacaatctgaatcttaggcataccagtatccttgtggagcattgcgttaaaatctttcttatcttcattggccatctgcggcacctcctgcattttctctcttatttcactgcagtgtatgccataatcatataacgtttcgaatctttatgcaatgagacggtttgaaatattttgtgctccttgcctattggtgcaaattattatatactacctttagttcatatttttataatctactatattttccgaaaggagtttattttatgaaattcgtataccctgccgttttccgtaaggaagaatccggcaaatatcaagtatttttcccggacctaaaatgctgcaccgctgtaggagactccctggacgatgccattgacaatgcaaacgctgctgcctatgactggatctattctgagcttatggagtttgagggagagcttccctctgtgtcagatgaaagtgacctgggccttcaggaaggagatattgtacggaatatttctgtaaatgtacgattcttcgagggctgggacgaataacaaaaccgtcaggcccctcccatgatttatgaggggcttgacggctttatgcatgaaggtacagctgttaagctgctttgcttagtacattatgtgcatttcccagagggtctttccgttttattggagctctcttccgaaggagtgggctgcaaaaacttatcatgaagcctctccgccagcatataccagtgctggacggtgttttccagtctgaaataatgaatgagataggccgtgagcagcaccagaagaatcccggccagaaccaatggcacagcattcccttccagaaaaatccacaaaatcacagcaaaaataaatacaattccagtaaaaaccgttaccagcagatgaatgagcctctcatgctgcagccactccagcttcttttcatgccatagcaaaagctcctgaaccggtaccccctgggcaagcatttcaccaagatatttttcatgctcccggcaataggccataacattaattccaaaacgatcctctttccctttcaaccgattcctgcacctccctggaggatggactctatagctttcctataaaaatcactttcctttatatacataatactttaggtcaataattctgctaatctcttctgaaaacaccaattttttcaaattcagccccttagctacatgctttacagaactataaatttcttcagtacattctttttgcaatatggctaaaacttgggaaggagcgtctgtcagcttttttatatcctccagcaaagccgaggagggtacataaatactgctctctttacttaaaccaagacaaaaattcatgccgccaattaccttatcaaccaacaaatacgggcgattacgattataatcgcctgtaatttttgtgatctttgttatatccatcaaaataggaagagcttcaagtttcaaatgcgcagttccatcaggctttaatctgatttcttcagaggataacttgttttccatacattttctaaaaaaattcacagattgattacgtagtacattacctttgctatcaactaactccaatccagttaaatgttgataatttctctcataaaacattacctctatgtattgaatagaattatcatatctctctcggtaaataataagcagttttttatttaatagtcttttgtcatatagcttagcacagttcagtactctctttcttgcctgttcctgtgtaaatttcataaccagtcaagacctccataaatttaaagagagagcaataacaccactgtgctacatactctctctttgcggctaattttagtgttgtctgccaacggccagctgatagccggcaagcatatcggattttagtgttgtccgccaacggtcaatcacaggattgacaagcatatcagatttaagtgttagcccactagaaaagcacgcttttcttctactattattatacgcacattcattttttatgtcaatcatccaattgccttttccaagttaactttttttcgtgctgaacattttcggcatcatttttcagtcgttactttttcaaccgattcctgcacctccctggaggatggattctacaatctccacatagggctgaagctcctctaaagtggctcgtccttgtcgtttcatctttgttacattttcatagactgccggaagagacctggtcattctgccatccccatacatcttcaccatgtccccgttttccagcacatccgatgaattcagacttcccttctggttgtagattccttcttttgggatatctgcagtaaatacagtctgtgaatccatatctacaaaatatccctttttcaaaagctctccatgttccacatagatggcgtgaattgcttctgcctcctggcgtgcctcttcttttttcaccagctcagcctgcttgcccacctcactccagaatcctaaagtgatcacagcaaaaactgcaacaaacaaaatcattcccacaataaatttaatatccctcggctgcttttccttcctgttctcctccacggtcttggccctttctttcatccaggtcagcggcagatgctgcttttgctgtacccgccgctgccacttctcttgtttttggtgtttctccttcctctttatattgaagtggaaagaagaatcatttattctgtcgaatattaattatactatacctgcccaaaaacacaagggttcaaaagacaaatacgcttggacacctaccgtagaggggcgatgaaactggtgaaatacacctttgcgttcatctgccccgtgaatagtaactaccgtagaaaaagaagggatttccagctcgtattgttcttccatcacaggaatccgtctttcaccataaccgtttaatcaggaagtacattccttttcaaactgttgtaggctgccagaatatatacgaaataaatcaccaggaaaatccccagggccacggccactatacctgcgatctcccctggcccccgcacggccccagcctccatggtgctgctcagcgccacaataaagggaacgccgatgagaacaggcggcagggcaggcatggcataaaaaatggcaaactgtctgcgcagtgctcttcccatttcccttctgtccatccccagatcgttcagcatccggaactggcgctgatatctgcttgtttcactgagctgctggatggtcaaaatggtagctgccaccatggtaagcaccaatgccagataatacagaggaaatatgatcactgcataataggaattactttcttcctccaccatagcttttgaaaaaattgtatcatagcctgttttttcagactccctttcatcccggatctggcagagctgtttatagttttctcccacaaccggttttgttgtcatggctgcatagatcctatgactcacccccagatccttcaccatctcatcaggcactaccagaacaaaccctcttccattgccgtcccaataggactgggtaaaatcctctgcgtatagctttcccggagtgagtgtatttcctcctacttggacaggctcctcataggaattcaaaaagttctccagataacccatgcagtgaatcgtataggtacctggttcatattctgcctccggatagcccagcatggcccgcagtgccctatagtcactggccttcatgaaaatatccttgtcataatccgtataaaacttttcgtcatgcttctggaccgcctctgtcacctgtgcattctcacccaaatagacttcatagctccaggaagcctccacaggaatgtgttcatcaatatatgactcatacccagcaaaggaatcctgtgacagatctatgctgccgatgaacagatcaaagcaggtggtctgcctggaccggctctggaacagggtattaaataccatgccggatccttccgcaatgagggtgcctgtaaacagtaaagctatggtagccattaccacacccatggtggccagctttgcggacaatgtacggaaaatcagaagagtctgaccactatacttcttctcaggacgttttcgaaaatactccggaactcctgaggagaagctgataaaaaagccatagagaaaaagaatgatcagggctgctcccaaaagtccggcagccaggttgtgaagcattaaaagtgcagtacccaaaacgccaaaaacaagggaaacaacgaaaattttccggcgaaggctctcttttttaataacctctccttcgttctgccgttcaaagtataacagatcataaatcttcattttattaatggtccgccggcttttcaccagggcaaacaagtaaataagcgcaaaataacccaaagacaaggcaactgcctgaatggaaaaggcatagctgaactcataggccatatggaagatggacaaagtgactgcccgcagggcctgaaagatcagattgcccaacaaagtccccagcaccagggccgccgttcctacaaccaggttctccagaaagaacagtcttgccacctgtttattttccaagccaataagaatataagttcccagctcccggctgcgctttctcaacataaatttggtggtataagaaaccagccagccaataatgcacactacggcaatactcaccagactcacgatcaggggaagggaatccagcatagctgacagatcccggatctccttggaaaagaccagactgttaaaggcgtagatcaatgccgccgccatgacaatggtaacaaaatataccagataatccctggcctggcgtttggcgttccgcagagaaagcttagataacgtcactgacatcacctcccagcaaggccagtacatctaagatctcatgatagaagatctgccgtgttctctgtccccggatcagctcattaaacaatcttccatccttcagaaagagcacccttgaggcatagctggcactataagcgtcatgggtgaccataaggatggtggcacccatctcttggttcatccctgtcatgatctccagcaggtttttggacgccttggaatccagagctcctgtaggttcatccgccaatataagagactgccctgctaccatggcccgcgcacaggcggcacgctgcttctgccctccggatacctgatagggaaacttttccagggagccttcaattcccagctttttagccacctcctgcaccttctgctgcacagtcctgggagctgtatggttgatggtcagggcaagcccgatattttcttcaagggtaagcgtgtccagcaggttgaaatcctgaaagacaaatcccaggcgctccctgcggaaacgtgccagctccttggagggaatttccgttacatcctctccatccagcaggatgtttcctgcgctgactgtgtctatggtggagatacagttgagaagggtcgtcttcccgcttcctgaagctcccatgatggcgataaattccccgtcctgaacctgaaagctgatgcggtccagggcttttgtcacattatttttgctgccgtaaattttctcaacattttttacatttaacatcttcctgcctccttcgtttctgatgcctatggtatcacagaaacaaagtgccttgtattgatttgtctttgtgttatcttacggttttgaaagattctctttcgagggaaaggtaagggtaaagcaggtcccttcccccacaacggatctcaccgccagctcaatgtgcaaaaactctgccagcttccggcagatataaagacccatacctgtggatccgccccggctgcggccattactgcctgtaaagcctctgtcaaagatccgggacagctcatgctccgggattcctatcccattatcggaaaccataagctgtgcctgcctgcccagcattttagcagaaagtgtgatcccaggcgcctctcccccatagcgcacagaattttgaagaagctggccaaggagaaatgctgcccacttcacatccgtataaaccgggatatccagtccctgggtttcaatcccagtcccactttgcagaagaagcgctctgtgctggcccaatgcctgggaaacaatctccatcatacttgtctgccgcacaacaaaatcctgctgggcactctgcatccgtgcataatacaaagcccgctccacgtggttttcaatgtggcttagctcacactgaagcttccggcgggtgtctggctccacattccggcagataagctgggctgcggtaatgggcgtcttaatctcatgaacccagctctccacatactcctgataatccttctgggctgcctgggcatctgacacagcccctaccatagaccttccgctgatcttcataaactcaaagagcctgcgctcgtacacccccttgggtttggggatacattctgtaaaaagatatttcttgtccagcttatccataatgagctgcagctcctgtaaataggctctcttttccagaaaatcccttgtatgagctatacacaggcccaggagccatactgtaagaatgataatgaccactcccggcacagtgcctgtggccagcaaaaaggcacacagacctgccatgcctgtgagatgaagaaagaagccgcccagatgatctgatccatactctctccaagtcatatttgataccccatcccacgccgggttttgatcagatcaggaagccccaggtctgtaagcttcgcccgcagccgggtcatattcacactcagggtattgtcatcaatccaaatctgactttcccacaaggcatccagcagatccgcccgggatacaatggttccctgatgctccataagacaggccaaaatacgcagttcatttcgagacagatcggccgtgcgcccttgatactctgccgtgcccttaataaggctcacccgcaggcctaaggcctgaagctcatcgttctgggccttgcctccccgccggcggagcacagccttgatgtgagccaaaagtactggaatgttgtagggttttgtcacatagtcatccccgcccatgctcaaagcccgcagctcatccatggctccgtcccggctggtgacaaaaattatggggacctctgaattcttccgtatttccccacatatgagaaagccgtcccggccgggaagacccaagtccagcaggatcagatccggatcggccctttttacctgtgcggccacatcctggaacaccgtgactgccagcgcttcatagccttcgttgtgtaagattaaagccaattcctcccggatcacaggatcatcctcaatgatcataattttctccactgtcttcacctctctccacaattgttctataactcccagaagatgtgtcaaacacctcatcctatggttcttgttgaatttgtgtctggttcactgatctcaaaaatatcctggaaagatatttttgtattgatgatcttcagcaccctggctgtgtcatcaatcctggataccatccctgttaatctcaaatactctcccttgcaatagtatgccacagtgatgatatcctttttatgaatgcggcggagcttttcatccagctcctgcccatattcctcggaaaattccctttttggcacagtgatcttctcttttttttccagtgcctctggtaaacccttcaatgcagcaaagggcatgaactgctttgcccgttcttcccggctcattttagtttccacttctatgccctccaatctgctggtttctctccctggtggtagctccatcttccagattcatgccttttaagatggcatttttcccaaacttctccttaatgtccaggacagccttctgcattttatgctctctctccaattgaactggatccgtaaacagatcatattgctgatagatctcatccaccacattgttataggttagagaaatcctgtgaattggcgcatgcctgtcaacgattttctcgtagagcttaagggtataggcaatgatctgttttgccgagctggtggtgacggtcatggagatggtgccgtgggcagattttcgggccaggcggttggcataccccacatgaagggtaatggaatccgtcaccagtcccttatccaccagttccagacaaagcagatccgccatttccttcacaatgagcctgcctgcttcaaaatcatagtcacagcccagaacctggccgctggatatggagttggttttagacttataggcctttatatccgccatggtggtggtctcccttccccaggcatgatcaataagcagctctgcatcaatgccaaaaagccggtacagcagggcctcctgtgcctgggcgatgtcccccattgtaaaaatccccacccgctccagctgcctggctatccctggccccacccgccagaaatcagtgatgggcctgtgtttccacagggttttcctgtaggcttcctcatccaggattccaatatgattctccacatgcttagccgtaatgtccatggcaatcttggcaaggtaaagattcgttccaatcccgcaggccgccgtgatcccggtgctgctgtacacatcctccatgatccttacactcagctcttctgcctccatctgatacataccaagataatctgtcacatccataaaaacctcatcaatggaatagacgtgaatatcttccttggaaacatattttaagtagattccataaatatctgcagaatagtccatatataactgcattctgggcggagccatgatataatcaattcccttagggatctcaaaaaccctgcacctgcccggaacaccctttttcttcattgccggggaaactgccagacagattgttttttccgtgcgctctgggtccgctaccaccaaattcgtggtgaggggatctaagccacgctccacacactccactgaagcatagaaacattttaagtctatacaaaaataggttctgttctccatgatcccttttctcctgactttgctcgttgatatcttatagtataccccggagggtttttattacaatagaagagcaagtgcatcccctgcgcttgctccctttcgcttaactatatctttgtttttccttgaaacagctctgggtgggggtgaagttcatctgcatgatagatattaatacggttgacatccccgctgcggtctttaaaggccggaaagagaaatccatattccggcggttccggctcataatctccgtgaataggacagattgtgcagacaagaaactgatagatttcctctgactcccaaagctgttctttatcattggctttcaacggtacatcataggtgccataaaacagataaacggcatatggctttttcgattgataccgctcacccacgtattcataaaaggtatccagcaaggcatcattttttagttcacaggctttgagtcccattaaaagctgccataattctcctggtttcttggcttcttctacaaattcatgctcctttagctctctatttgtatgggaaaaggggattgctttggcaagcaaaaggttggctgcctgctgggagggagacaattttaaaaaatgtctgttaaacgtaccgtccacatacccttcttcatccatatatgcccctgcaattctgctgaaacaatttctcttaactgtcatacgcctggtaagctccagcatatcttcccggttgatctttcccatcttgattattcgtctcctgcctttttcgtttatcataaatgtacatttccatttgttatagaaaatttgtacaagttttatccttttgtttttggtacaaattcaatttttaaaaccattcccattccctctgctaatcgcttcaataaatttaaagaaggatttcttgttccattctctaatttactaatatcagcctggttaattccagtcctctctgataattccttttgtgttaaattttgagaaaccctggcatccaccattgctctaattacatccatttctggctgtaatgcttcatactcttttttaaattcaggattttccatttgctgattaataaattcatttaatgttttcatcaattttactccttccaataaattcatttcttcgctttttagctaacagtatttcttgtattggcgttttttgtgttttcttgacaaaaccgttggtcaaaattatccttttattataataaaaaaaatataatactctcgttatatctgttcccacttttcctcgaacttcaaaaatcccatctttcagatgcttactatagggttctcttaattgattgcccttctcctctagtatttgtaaaattcctaataattttgctcgcatttttatgtctagtgacagaagaaaatcttcaactggtttattaccattgatatcttcataaaactctactgtaaattgaagcatacatagtacctcttcttgttttttattatatggcatatatgccatattgtcaatctttccttataagtaatcaggacatatacaaaaagtaaaaaagtattttcagaaaatgctactatgactaatgtaccatctataaaataggggggggaattgataaatagaaaatatgatttcatgaattttacagataacaaaaaaagcttaaacacaacatttaagcttctttagaaatgccgcagaccggaatcgaaccggtacgggggattagccccgcaggattttaagtcctgtgcgtctgccagttccgccactgcggcattttaaggttatggggcctatagggctcgaacctatgaccctctgcttgtaaggcagatgctctcccagctgagctaagaccccataacgacccagaagagactcgaactctcgacctccgccgtgacagggcggcgctctaaccaactgagccactgggccaaatatttaattaagaagtggaccttcggggactcgaacccaggaccgaccggttatgagccggttgctctaaccaactgagctaaaggtccaaaaagccgatgatcggactcgaaccgataacctgctgattacaaatcagctgctctgccaattgagccacatcggcgtataatgcagtgaactagatgtattatacaccaattgcctgaattaatccagagggtaacgcacatctttttaacttttttaaatgactccaaggggatttgaacccctgttaccgccgtgaaagggcggtgtcttaaccgcttgaccatggagccgaaaactccccctgttggactcgaaccaacgacacttcggttaacagccgaatgctctaccgactgagctaaggaggaataatgacttccgtcatcttctcttgaaggcctgcaccttcaaaactgcatacatgcttttttctttgaacttcccgccagggccctaaagccctgcgctttctcttggtcaagccctcgaccgattagtaacagtcagctacatgcatcactgcacttccacctctgtcctatctacctcgtcgtcttcaaggggtcttacttcctaagaatgggatatctcatcttgaggggggcttcacgcttagatgccttcagcgtttatcccttccggacttggctacccggccgtagacttggcagtctaaccggtacaccagcggtccgtccatcccggtcctctcgtactaaggacagctcctctcagatatcctgcgcccacgccggatagggaccgaactgtctcacgacgttctgaacccagctcgcgtaccgctttaatgggcgaacagcccaacccttgggacctactacagccccaggatgcgatgagccgacatcgaggtgccaaaccactccgtcgatgtgaactcttgggagtgataagcctgttatccccagggtagcttttatccgttgagcgatggcattcccacttaataccaccggatcactaagtcctactttcgtacctgctccacccgtcggtgtcgcagtcaagctcccttctgcctttgcactctccgaatggtttccgtccattctgagggaacctttgagcgcctccgataccctttcggaggcgaccgccccagtcaaactccccgcctggcattgtcccaccgccggttcacggcggctggttagaaacccaatactgcaagggtggtatcccaacattggctccacggcaactggcgtcaccgcttctcagcctcccacctatcctgtacatgcaataccggatcccagtaccaagctggagtaaagctccatggggtctttccgtcctggcgcgggtaaccagcatcttcactggtacttcaatttcaccggatgcattgtcgagacagcgctcaaatcattacgcctttcgtgcgggtcggaacttacccgacaaggaatttcgctaccttaggaccgttatagttacggccgccgtttactggggcttaagttcaaagcttcgcttgcgctaacctctccccttaaccttccagcaccgggcaggcgtcagcccatatacctcacctttcggtttcgcatagacctgtgtttttgctaaacagttgcttgagcctattctctgcggcctggtttcccaggcaccccttctcccgaagttacggggtcattttgccgagttccttgacaatgcttcttccgccggccttaggattctctcctcatccacctgtgtcggtttacggtacgggtacggtatgaacgatagcggcttttcttgacgcatggctcacggtcttcgctactttatttcgctccccgtcacggcttcccattgatgcacggattttcctttgcatctggtaccccgcttgggccgggctttccactcccggcttccgctctccttacgtgtccccacagttctgtcataccgcagtacaggaatctccacctgttgtccatcggctacggctctcgccctcgccttaggccccgacttacccagagcagatcagctttactctggaaaccttggatattcggcctagaggattcccacctctatctcgctactcattccggcattctctcttccatgcagtccacagctcctcacggtactgcttctctccgcatgcaatgctcctctaccaatcatctctgattcctcagcttcggtgtcgtgtttcagccccggacattttcggcgcaggacctctcgaccagtgagctattacgcactctttgaatgcatggctgcttctgagccaacatcctggttgtctgggagatcccacatccttttccacttaacacgcacttggggaccttagctggaggtctgggctctttcccttttgactgcccaacttatctcgtgcagtctgactcccggcaatcgattatacggcattcggagtttgatattcttcggtaggctttgacgccccctaggaaattcagtgctctacctccgttaatctctgccgaggctagccctaaagctatttcgaggagaaccagctatctccgggttcgattggaatttctcccctatccacacctcatccccacccttttcaacggatgtgggttcggccctccatcgccttttacggcggcttcagcctggacatggatagatcacccggtttcgggtctactcttactgactctggccctgttcagacttggtttccctacggctccgtcccttaaggacttaaccttgccagtaagcgtaactcgccggaccgttctacaaaaagtacgcggtccacccttaacggtgttccacagcttgtagacacagggtttcaggttctctttcactcccctcccggggtccttttcacctttccttcacagtactatgcgctatcggtcactaagtagtatttagccttagggggtggtccccctgatttcccacaaggttccacgtgtctcgtggtactctggatcctgctcagcctctctggttttcacgtacggggctttcaccctctctggccggctttcccaaaaccgttccgttaaccttcctggatcttaatcgcagtccgtaaccccggcatgcacgcacgccggtttaggctcctcccatttcgctcgccgctactctgggaatcgagttttctttcttttcctccgggtacttagatgtttcagttccccgggttcccttccatacgttatggattggcgtatggatgtctgaggttttctcagacgggtttccccattcagacatctccggatcacgggatatttgctcctccccgaagcttttcgcagcttatcacgtctttcatcggctcttagtgccaaggcatccgccctgtgcccttattgcttgacctttgctatgttcctatagcgttaggaacatacggttcgttctctgatttttcttgtatctttgactcctccgctctcgcagattcgtcttcgatgtcttcctatcttgcgtttgcatccctcgtatatcttgcgatatccttaggatactctttttcaaggatatctattcgtttgaatagattttttacatgtatgcagttttcaaggtgcatgtacggtccagctatatcttttggaccgatgggcttaagtggactcgaaccaccgacctcacgcttatcaggcgtgcgctctaaccagctgagctataagcccgtcttccatcttctgtttatggaaaatggagatgaagagattcgaactctcgaccccctgcttgcaaggcaggtgctctcccaactgagctacatccccatttgatctggcgcccacctgctctcccacaccgtctccagtgcagtaccatcggccgtctgggtcttaaccgtcgtgttcgggatgggaacgggtgtctcccccagacgcatcggcaccagaaagttcttgttatcttttttgataactcaacagtgaaacactcacaattctccatcggcttactaagctcctgctttgcattcgctgactgcgccgatgcgtcttctcactagattcgcttgcgctcatcaagtgttcaggacgtacttcttcttccttagaaaggaggtgatccagccgcaccttccgatacggctaccttgttacgacttcaccccagttatcggtcccgccttcggcagctccctccttgacggttgggtcactgacttcgggcgttactgactcccatggtgtgacgggcggtgtgtacaagacccgggaacgtattcaccgcggcattctgatccgcgattactagcgattccagcttcgtgcagtcgagttgcagactgcagtccgaactgagacgttatttttgggatttgctcaccttcacagggctgcttccctttgtttacgccattgtagcacgtgtgtagcccaaatcataaggggcatgatgatttgacgtcatccccgccttcctccaggttatccctggcagtctccctagagttcccatctcactgctggctactaaggataggggttgcgctcgttgcgggacttaacccaacatctcacgacacgagctgacgacaaccatgcaccacctgtctcccctgtcccgagggaaatgccccgttacggacacgtcagggggatgtcaagacttggtaaggttcttcgcgttgcttcgaattaaaccacatgctccaccgcttgtgcgggtccccgtcaattcctttgagtttcattcttgcgaacgtactccccaggtggaatacttattgcgtttgctgcggcaccgaatggctttgccacccgacacctagtattcatcgtttacggcgtggactaccagggtatctaatcctgtttgctccccacgctttcgagcctcaacgtcagttaccgtccagtaagccgccttcgccactggtgttcctcctaatatctacgcatttcaccgctacactaggaattccgcttacctctccggcactccagccacgtagtttccaatgcagtcccggggttgagccccagcctttcacatcagacttacgtcaccgtctacgctccctttacacccagtaaatccggataacgcttgccccctacgtattaccgcggctgctggcacgtagttagccggggcttcttagtcaggtaccgtcactttcttccctgctgatagaagtttacataccgagatacttcttccttcacgcggcgtcgctgcatcagggtttcccccattgtgcaatattccccactgctgcctcccgtaggagtttgggccgtgtctcagtcccaatgtggccgttcaccctctcaggccggctacagatcgtcggcttggtaagccgttaccttaccaactacctaatctgacgcgggtccatcctgtaccaccggagtttttcacactgctccatgcgaagctgtgcgcttatgcggtattagcacctatttctaagtgttatcccccggtacagggcaggttccccacgcgttactcacccgtccgccactaagatcagatcggcttcaaccgaagtctctgtcaaactgatctccgttcgacttgcatgtgttaagcacgccgccagcgttcatcctgagccaggatcaaactctctgataaagtttgatttctcaagataacgttagctatcctagaatcctcattactgtttggttcgaatttgttctttttgaaatcttcttaaagaattttcgagaatcgtatgtgtttcactgttcagttatcaaggttgtctgctgttcttgtttcagacagctttgatattttatcacgctgttttctgtttgtcaagaacttttttaacttttttcaaagttttttgttgttgtgtgaatcttttgttctcaccagcaactttcttatactatcatatctttcattgcctgtcaacaactttttttacattttttaacaagttctgctgaactcttttgtaatgtgctgttgtctgcaactctgatataatagcatatggcctctaaatttgtcaacaccttttctggaaattttttgtttttttcaccccctttttctccagataatccggactattttccgtagaatatactcatgaaaatcttcacaaaaatgttcttattatataggaagcttaaaaaagcatcctgttcaatcatcttcatgcactgctgcccccagggagtgttgcagaagatggtcagtaccagcagagccacccagataaacagcagacctctgatcccgcccataaagaatcccgccaggcggttcactccccgcaggatgggcagcttagcgataatatccagtacataagccaatgtgcggatgataatcgtggccagcacataggacagcaaaaagcccaggccattgaccagcatttttgccagagcgccggatacatactccgcaaaggtatccactgccagatactggtaagcctcctgattattgttgttttcaatctgagattttaaaaaaccaggaagcggcaggctgttaatgatctcttcctgcgcctcccggcctgtttcccctaagcctgccagttgtttttccacagattcccggcagctttcctgtattttctcatacacaggggtgctttcctgaaggaaggtacctacatagggattgatgatccatacgatcaccatggccaggatcacaaaacaggtagacaccacttccttcacaaaacctctgcgaaaaccaatgtagcaggagagcaacaaaattgctgctgtggcaattccaagccaagtgtattccattttctctcctcgttttctgttaagttaatttaattacgcttactccgttgtccagcactaaaatgtatttattatatccgatcttaaagaaattcctcaccgtaccctcatcaatgttgccgttaaatttctccacaccggtgctgctcatcacacaggcctgggaagagttaaacatcacaatctgcccgcctgtcattttgatggtggtgtatggtatattaaaggatttctcaaacaactgctttccatccgtattatatacctgcatcttatacagtttgtccttgccatcttctttaaatacaagacctatatggctttcatcgtaaaaggtgctgacaatctccttatccaccttcacggttttggtctctttgggaatctgctttcctttataaatgctaaatccgtcatcccggaaagccacggacagactgctgtctaaatactgcacctgaggaaccaccactccttcgtaggtgtaaccgctgacaatgttgtcaatctggttctgtcccgctgtaccaaaattataaaacgcaatcttactggttgttttccccccatccacaaactgataggcgaccatgatcagcattccatcctgggagactccaatatccagaggatatcccggatcgtccaccctggtctggttttccgcaatgatggttccatcagaggaatagaaattgatccaggtgtcctcacctccatccagaatcgccgccaccacgccctgctgggctactctcgcctttacaatattataggaagtatcaatggtcccggtctgtccgttctggtcaaataccaccatggtgcttccgccctcatcggcaatgaccgccgtgccctcgcagatgtccgcaaccgggtcctgcatctcataagtataggtccacaggctctcctgcttcttggacaccagagaggcaccgtccgggctgtagcggaggatcgctccatccatctccacatattttgttgaaatggtatcctcctggctgctggagctgagcacccggtagctgctatagcttcttttatccataaaaagccagattcccgcagccgccaggacagccactccgatgccaataagggtacgcataagattctttcgtttatgctgcgcgatgcgggacttgtagtcatccacatcatttcctgtggtgacaatgcctgcctgcttttccagcatggcttttctggcagccagttgctgccttttccgctttttctgcgcctctgtttgtttattatttcccatgccaatcgtccttatcctatggtttttgttggaaaaccgcggttttccccgtgtgcccattataacacacaggtcagggtaatacaattatttgtcctggataaatcgtctcctcttcatccaggccgtttttccggcagatctcctccaccacatccagactgccgtaaaattccatggcaatattatttaacgtatccccctgcctgatctgataagattttccggaataaccagctgccgtctccctgtcaggaactggtgtattctggggcgcttctgttttctcagggacagggctttcctggacatccgtaatctcaggtgtgggagcaggtgtctcctggacagaagaagtctcctggaaggttgacacctgcccggcggtttcaggcgtagtttcttggggcaggggtgtctgggaagcttccaccggtatctgacttggagcctgggtcacctttcttttatccaactgcatggatacctgctgaatctgtcctgcggcctcctgcattttgtcatagcttcccagaaaattggatcccaccgctaaaacagaaatggccagacatacactggccgcatagggaacccatgccataaaaccgttttgtcccgcctcttttttctcatttttctcctgtatgatctttcgaaaattcttcaccgcctcatcgtccacatcctccttggactccaaaggctggttctcgttgtgggcgatcatgtacgcctgcatcatgggatttttttcataataaatgtaatagccgggctgcttacacatgcggctgttttcatcatatcgaaaaaaagcctcttccttttcctgaggctctatcaaaaacagtaccttatctgctccaaagtatgtcacatgggtcctatacagcatatcctccacggacatggggattccctgggctgtaaagaaccatcctacaatctcctgctccggaaaatacctctccatctgttcgtgaagtgtcttccagatctcttccgaaaattccatgtgttccgggctcatggtctcctccaccaaaagcgcgcaccggatgaacacataagtgatcccctccgcaaagtttgtctgtcctaacagcagggcgcaccttgccgtctcctggacttcttccgcattttttttcaaaaaggtgtatgcatagtcttccatgtagattttgtatctctcagaaagcaggccgatttgtctgatgttcttaggaaggtaaaaaaatgattcattcccctttgcctcttttttctcctccttgtaaataacctctatcatatttatcacccctttgggctataggatagcacaaagattttgcagattttatcagaatctaagaggcctttcctttttttcaccgacacattctgcgtttctgcataaatgaaaaatttcaggataagataaagcaagagaaaaaatgtgagggttatttatgacgttttatattgacggagaaaaagagaactctgcccaggatattgcctactttctcagaaagtgcattctccaccaccgttcctgctggacagagctggtatttctatgtatcggaacagaccggatcaccggggactctctggggccctatgtgggccatcagctgagcaaatataccgttcccgggatcaccgtgtacggaaccttaaaaaacccggtccatgccctgaatctgacgaaaaccatagagcacatccagagtctgcatccttctgccctggtcatcgccgtggatgcctccctgggaaaaagaaagcacctgggttatgtgaccattggaaatggtgcactctacccaggtgctggtgttcagaaaaatctgcctcccgtaggagatgtttatatcacagggattgtgaatatatccggctttatggaacagcttgctctgcagactacaagactttccaccattgtcatgctggcagattccatcacacagggaattctcaccattctgcctcaatgcactgccaggatctgcgcaggtcccggactcaccccgtgatttacaggaattcctttacctgtttgtagatgcctgctgcatccagaccatatttctcaagaagtgcaacagccgggccggactcgccgaacacgtcgttaacaccaatacgttttactggaaccgggcatttttcgcttaagcattcacatacagctccgcccagaccgccgatgatggaatgctcttccacagtaaccaccttgccgcattctttggctgcagctactactaattcctcatccagaggcttaatggtatgcatgttgatcacttttgcctggatcccctcagcagccagcttttcagcagcagccagagactcagcaaccatcagaccattggcgatgatggcaacatccttgccttccctgagtacaatgcctttgcccagctcaaatttataatccgggttgtcgttgatcacaggagcagccagacggccgaatctcatgtacacgggtccgtgatgctcataagcagcctgaaccagagcttttgcttccacatcatcagaagggcaggctacgatcatacctggaatggttctcataagagcgaaatcctcacagcactgatgagttgcaccgtcctcaccaacggaaattcctccgtgggtggcaccgatcttaacgtttaatttaggataacctaccgagttgcgcacctgctcaaaggcacgtcctgctgcaaacattgcaaatgtgcttacaaaaggaacttttccagtggtggcgatacctgcaccgatacccaccatgttacactctgcgataccgcagtcaatgtggcgttccgggaattctttcttgaaaatacctgtctgggttgctgctgcaaggtcagcgtccagaacaactacatcctcgtgttttttacctaattcaactaatgcattgccatagctctgtctggttgcaattttctttacttctgacataatgcggcacctaccttttctaaatcttccatagcagttgcatactgctcatcatttggagcttttccatgccatccggcactgttttccatgaaggatacgcctttgcccttcactgtcttcataataatggcagtgggcattcccttggtggcttttgcttcttcaaaggctgctcttaactgatccatgtcattgccgtcagctacattgatcacatggaaattgaaggcttcaaatttcttgtcaatgggataaggagagcatacatcagcaatatttccatcgatctgaagtccgttgttatcaacaaccactaccagattgtccagttttctgtggcctgcgaacatagcagcttcccatacctggccttcctgaatctcaccgtctcctaaaagtgtgtacacccgataggaatcgttgcttaattttgcggagagagccataccaactgctgcagagattccctgtcccagagaaccgctggacatatcaacccctgggatatgcttcatatccggatgtccctgcagataagagcctaaatgacgaagggtcttcaggtcttccttggggaaatagcctctctgtgccagtacagaataaaggcccggagctgtgtgccccttggaaagtacgaaacggtctctgtctgccttgtgaggatccttaggatcaatattcatctcctcaaaatacaggtatgtaaataaatctgctgctgataaagatccgcccggatggccggcttttgcagcatgtacagcggtaacgatgctcttgcgaacttcgttggctgttttctgaagctctaatgtgttcatgttgtaatctcctttattatttagtttttcctacaaatttaactgttatatgaattctgccggtattcttattcaccaaaaacggctttgtagtcctgctggaattttacaataccaatgtctgtgagcgggtgatgaagcatctgctccagaaccttgtatggaacagtggcaatatcagcgcctgccagagcacactgggttacatgtacaggatggcgcacgctggctgcgatgatctcagtctggatattggcaactgcaaacatttcagcaatggtacggatcagctcaacgccgtctgtagagatatcatccagtcttcccaggaacggagatacatagctggctcctgctcttgcagcaagaagcgcctggtttgcagtgaaaaccaatgtgacatttgtcttgatcccctctttggccagcaccttcacggctttcaggccttcccctgtcatagggatcttcactaccatattgggatgaatttttgcgatttcacggccctctttgatcattccctctgcatctgtggtagtggccttcacctcaccgctgatgggtccgtccacgatggtggtgatctccttgatcacctcattaaaatctctgccctcttttgcgatcaaggatgggttggtggtaactccgcagatgatccccatatcatttgctttcttaatatcctcaaccttcgcagtatcaatgaaaaacttcatttttctttcctccgttttcttgatttttccttgtagccttccagttcgtttatctgatgaactaattataacacaccagaagggcgggtcaagtccccggagtttttattaataatttttctattaataattgtatattttataaactatgaatcctaatagttaaacttttgactattttatgcctgcaacagcaaggttttcacgttttgccacaaaaattattaataataattttcttatgtatatttatttaattttcttttttcccttgttctgccatttttccaggggtgcataggttgtggtttttctcacgatcagacggggggtatactctacattataaaggctggtaggctgaattccagagtaggagctgtgctgggtggaaatcttgcgcatgacgatatcgcaggcatcccgccccttcaaaaccacaaaatgttcaatggtggtgagagacattctgcggataccggaatagaaaatattgtcacagccaatgacagacacttctcggggcacatggatcctggcctcctggagggcatcaatggcgccaaaggccatcatatcattctgaccggctatggcagtaaaaaattccccctcttttagaagctccacagtgagggcatatcccatctcatactccgaatccatacggggaataatggtgtccgcaaaagcatccgcggccttgatgatcacatgatccttcaacccctctttttcaaactcactgacaaagccctgaattcttctggtcctctgccactgccgcttggtcaagggctgggtgataaaggccacgtgccggtggcccaggtccagcaggtgcctggccatcatgcttcccacaatggtattgtcctggttgatggcatccactgtggtggtcttctccttgttgctgataatgaccaccgggattcttctggccatctcctccacctgcccctgaaattccggattggggttgcaggtgtagatcacaccctgggggcgcagagaggccatcatccgcagatacttctcctccgtggccggatctctctgggtattgcagataaaaactccataccccttctcattggccactccctcgatcccctgaagaagcatcacataataagggctggtaagggtaggacagaatacaatgatcagcttgggcgacctgctctccttgctgttcctgcgcctgggagcctcatagcccagctccagggccgcctgctccaccttcgcctttgtctccctggaaaaggatacattgtgcttgtcacttaagatcatggaaaccgtggcctgagagacgcctgccgcctttgccacatccatggaggtgactcttttcttcatcctgccttcctcctacagctccacacggccttccagcgcccgcagcagcgtaacctcatcaatatactccaggtccccgcctacaggtacgccgctggcaatgcggctcaccttgatccccgtgggtttgatcagcttgctgatgtacatggccgtggtctctccctccaggctggagttggttgccacgataacctccttcacatccccttgaaggcgctgcatgagctcctttaacttaatgtcatcaggaccaatgcccagcatgggggaaatggctccgtggagcacatggtacactccttcaaacttcccggttttctcataggcagccagatctctggtgttctccaccaccatgatcacactggggtccctcttgggattgctgcagatgggacacagctcctggtctgtaagggtgtaacatttcttacagtactggacatgctccctggctcctgcaatagcctgggtaagctggtttacctgctcttttggcatattcataatatgaaatgccaggcgttgggcagatttcgctccaatgcccggcaggcatgacaattgttcaattaatttgctgatataactgctatagtattccactgcaattctcctttttgtaactgcatttatgatactatacccagattttttttgcaagtgggcaccagaggaatttacgaagggattacggcatacaggctttgcgttattcttttttctccctttcatatataagtacaagttccgcgatccgttgtgccagctcatgggtaaaaacaccctggggtgcccgccaggtccaattccctcctgtggtagaaggggtattcagtctggccttgctgtccagtcccagataatcctgtgccatgattatcaccgtattgcacacagttcccattgccttttttatcagcttccaggcaagctccctgtcattttccagatccagatactccatcatccgcctgtaatccccatgtttaagagagtccacccagccaagcactgtatcattgtcatgggtacctatgtatgccacactattttgtgtgtaattatgaggcagataattgccctcttctctggaatcaaaagcaaactgaagaagtttcatccccggatatccgctgtctgcaaggagtctttccaccccttctgtgagatatcccaaatcctctgcaataaattcccgttctccaagggctgcccgcactgcatgaaacaattccatccccggcccttttctccatacaccgtcctgtgccgtggaacttccaaagggaatggaaaagtagctttcaaaaccacggaaatggtcgatccttaccacatcatataaagtcgtggcactgtccagtctgcgtatccaccattgatacttctgcgcttttatgtattcccagttatataacggatttccccaaagctgtcctgtggcagaaaatccatctggcgggcagccggccacatttacaggctgtttctcacaatccagctcataatattccggcgctgcccacacatccacactgtcatatgccacataaatagggatatcaccgattatacggatccccttattatttgcataagcctttaccgcacgccactgccggaaaaattcaaactgcacaaattcccagaacagcatttccttcctatataaatcttttgctctgtccagggctgatttcttccggtctctcaattccttttcccaaagattccagctctgccccttatgagcatcttttaggctcataaaaagggcatagtccatcagccaccctttctcctgttcttgaaactcctgaaattcttcatcctctatacgaaaaccagcaaatgcctcacggagaattttatatcgtgtcagatatagcttttcataatccacccgccttgattcttccacctgaggaagctgttcttgtcccaacagaccttcctctgccagcaggtccaaatcaataaaatatggatttcctgcatttacagaataggattgatagggagaatcaccatagctggtaggcccaacgggcagaatctgccaatagctctgctttgcctcagccaggaaatccacaaatttatatgcctctttgccaagagtccccactccatagggggagggcaaagaaaaaacaggaagcaatatcccacagcctcttttattcattctaccttttcctttcttatagaaagattatttatttagaaagattattccagctcaaggatgataggtctgccgcttgttttggcccgctgggcctctacctccacggtcccgccatcaataagattggtatataaaccatccggcaaatccaccttcacacgggcttcctggcttttcaaggcaaagatcccaatgagctttttattttccatctcataggttccaaccactgtatgacaggtatcgtctgcctccagctcatagtctccgtaagccatgatttcttttttcttgatctgtgccaatttctttattaagctgctgatgtcccttccggtgttccaatccaccttgtcaatgtcaaacaagctgggggtgcgtacgttttccgtttcctgtcccccatagatcaaagcagaaccctgctggaaaaagtaaaaggccgtccagttgagaaggtcgctttcatttggcacagccgccctggcccgtctctggtcatggttttccaggcagcgcattttcacgtagttgtccggataggtaatgtgctgctgattgagaatcttcacatacatagaaaggctgatctcacctgccagataggcgtcccgaaaggcccagatatcataatcgtattccatatcaaaggcctggaacatttctccgtccgaatggcctgtctgtccctttctcctgttttccctgataaagccaggctccacactttctgccagccagataaagccaggttttactttttctactgcttctctggcctccagccaaaattccacgggcacaagggaggctacatcacaccgatacccatccaccaattctgcccactgacacagggtttccttctggtattcccagagctctcgattgttgtaatccagatcgatcacatcgccccagtcaccggtcttatttccaaaccttccgtctgctttccggaagaaaaattctggtttatgcaccgacagccaggaatccggtgatgtatggttatacaccacatccatcatacatttcattccccgcttatgaatttcccctatcaaatgttcaaattcttcccgggtaccatactctggatttactccgcgatagtcggcgatggcatagggacagcccagcgtgccttttttattcttttttcctatgggatggatcggcatgaaccatatcatatcggttcccaaatcctgaattctgtccaaatctctttctatggaagcaaaggtgccttcctccgtgtgatttctaatatacacagaatagatcaccatatttctcaatgtcttttttgtacttactgccataattcctttcctcctaatatctggttttatacatagaaaaagccccggcttttctaaatacaaagacggggcaatgattagataaatcatatcttctctttatttcattgttgattggcgctccagcaattcacagggaaaaatcctatgcgtattttcctgttttttatgaagcatggaaaataagatctttgcggtttcttccgccattttttctgcaggctggtgcatggtggtaatggatggatgatagaaaaacgtctcatcaacgccgtcaaagccagccaccccacaatcctggggtatcctctttccgctttccagcagtgccttacatgcaccgatggctatggaatctgccacggcataaatacagtcaaacgcaataccagaagccagcagctcctttgtcatctcatatccattctccatactgaaaacattctcagcccaatccttactgaacaggatgcggctgggctcggcttccaaatgattggccgccaaagcatccttgtatccattcagcctcagccttcccacactttcatcacctgcactggctgccagaaggacaatacgcctgtatccctttttacacagataatccaccattttgtagctttccttgtagctgtccacatacacagaagaatagatattcagaggaaccttctcatcaatattcactgtgctcatcacaaagggcacgggtatccggcgaagctcgtcctctgtgcggttatggtttccccccagaaagatcagtcccttaagcttcttttcctttatcaggctgatggctgcttcaagctcatcatcagaaatgctcacatactgaaaaaaacagtggtagtcatactgttcaatattttcctccagcacccttctcatttttccaaatacagggttatccattcccttcacaatcacgccaatggtcttggaaccgctcttctttaagttctgcgcactgttgtttggaatataattatactcttcaatcacgcgcatgatcttctgacgtgtctctggattaatatcgggatggttattgatcgctctggatacggtactcaccgccacattacatttttttgctatatctttaatcgtaaccgactccatacttatccttcccttgcatttttaccagtattaactggctttatttcaccttattctagcaataatcctataaaaaggcaataggaagatcggcatcctgtgtccaccacacaccgttggatccaaagatacagccggcagattctgccatcgcccctgatgaccaaatctgctccagctttttacagcgcgtttacccttttactgccccggctaccacaccctcaatgatatgcttctggcatgccatataaaagataataatagggataatagacagcaccaaagtagccatcatagctcccatatccacagagccatgtccgcccttcaggtattggatcgcaataggtatggtcttatacttattatccaaaacaagtgagggaagcaagaaatcattccagatccacattgcctccaggatagccacggtaatacaggtaggcttcataaccggcagaacaatccggaaataggtctgtatgggattgcatccgtcgatcattgccgattcttcaatttccagaggaattgactgcacaaatcctgtaaacataaatacacaaaggccggcgccaaatcccagatacacaagcaccagccccagaggagttgtcaggtgcaggatattcgaaattttagacaatgtaaacattaccatctggaagggtacgatcatagaaaatacgaaggaataaaacataattgaggtaactgtgtttttcacccttacaatataccaggcgcacatggaggtacacagaagaagcaccaaaacagacagcacggtaactaaaaggctccagccaaaggcttggaaaaaatcagttttcgcaattccgttaacatagttcttcattccctgatacatctttccagtgggaaatgcaaaaggtttcttcataatatatgcctttttcttaaaggagttcaaaactacttcaagaataggaaatacataaactacacaaatgacagtaaaaattatggtcagaagggtattgccttttttacttttcaccattattgctgtacctccttgctctttgtcgcccgaagctggatcactgcgatgacagccacgatcaaaaagaatataaccgccttggcctgtcccactccttccgtacccggcttgtcatagaaggtcttataaatgttcaaagccagcatctgggttttattggaaggtgcacctgcagtgagcgccaggttctggtcaaacatcttaaaggagttggttaaggtaagaaacgtacagatggtgatggaggacatcagcatgggtattttcacctttaacaaaagcttccagctagatgcgccgtctatcttcgcagcctcgatcaattcaccggggatattctgtaagcctgccacatagatgatcatcatatagccgatagactgccagttcatcagaatgatcatgccccagaagccatatgtaggactaaacgtaattgtttttccgaaatagcttaaaacgccattgatcattaactgccagatatatccaaggataatcccgccaattaagttgggcataaaaaatacagtacggaaaatatttgtgcctttaattcccctagtcagcaccagcgcaatgacaaatgcaaaaaaattaatggtgataacagaaacaattgtgaaaactacggtaaatccaagtgcgtgtataaaatccggatcctgaaagattttcgtataattggacaatccgatccacttcgcattggtcacagtagtaaatttacaaaatgatagatagattcccagaacaaacggtgcaacaaaaccaacgataaatgcgatcactgtgggaagcgcaaaaaccggaaaatacctgcccatcgtcttattattcatttgtttccctcccttatccgccttttgaaaaggccgtcagaaccattcctcctgctctttgaaggagaaggccggaactccatccagccttcccttcttcttagcgggattagtccgttggctcttccttttcaggagcccagttgttaacaatggcatctgcaaccacatcccattccccggttccctgtgcatattccattagacctgcgccgatcttgtccttgtatgtctggcttggcattgtattgaatgcccaggatatattttccttgccagcattggaccattccataatggatgcagccagaggattgtccggtacttcaccctccccgaaggtattgtaaggtgagatccaacccaggctctctgtacagaatttctttccactctcgctcttaaacagccagttgataaatgccagggttgcctctttatcttcctcactggaattgcagttaatggtaaggtttgcctctgaaccaatgcaaagtccctgattttcttcaccctcaactcctatatagataggcaggaaacatacgtcatctgcggaaagatcttcattattttcgttgatggtggtccaggcccagtttccgttctgggtaaaggcaacctcctccagggcaaattctgccatggcattctccacagtcatactggaaagcatggtgggttctgtacaagaattgttaatatataaatcaaagatctgcttatagttgtctatgtaagtgccatctaaggtgtctgcatcctccacccctttgtctttaaactcatagtataatggcaggttaaacaaatgggtcgtccatctccactcttcccctggggagaaggaagtggaagcaaatgctccttcgattccaagctcatccttcttagcctgaatgtcttctgccaccttctttaaggtttcaaaattattaatctcatcaatggattgaataactgccccgtctgtctcgcaataatctgaaatgatccgtttgttcgtgataatcccatagccttctactgtgtaagggatggcaaatacaccatcctcatcggaaatggccaggctcttgtcacttaacatcgtataccagtctgtgtcagacagctcggtggcatagtccttccactgcttcagtccaaccttgcttccgatctggaaaagtgtgggagcctcttctttagccaattccgctcttaatacattggcataggtattggcaccagcgctgactacctttgcttcaatccctgtttcctctgtgaaagcaggaattacttcctcctccaggattgtggcatcctccggcttctgattcagccagtacacctttcctgtcacagcactgtaatcgtaatcatccttctcttctgcagaaaccggaaccgtcacagccgctgccatgatcactgacaaacttaaagccgtccatttttttgctcttttcatttttctaccttcctttctttttttggaaaaacgttattggaaacgttatcggtaacatacccggtaacgtttccggttcgtggcttaaagatagcacaacctctaaataatttcaagagattttaaatgaatccgtaacattttgtatatttttcacatttttccggtcttgtttttatcaatatagtacaaaaacaagtcttcaattctttcaattgacaaattccaggcagctctttatcataaacagcaaaacaaaaccatagctgtatgtacatggaggtgcaggatgccaaacgaaaattctctaagcattgaaaaagttgatgaaaccttaaaagagttaaacgtccacggctcttttgaactgcctgtggagacttacacggataattgtataatcttccattccctgtacaatcactggcataaggaaatggaaattatctgcattgaaaaaggcagcggccttgcccggctgaacaaagaaacgatccggatcaaaaaaggcgatctattgattgtaaactgcggggtgctccatgggattaaaacagatattcaaaatattttatattttaaaagcgtggtatttgatctgaatttcctttctggtcctcctggtgatctatgtcaagaacgtgtcatttctgttcttgcagagaaccaggcggagttcactcatttaatctctccaggggacaaaaattatgaaaatatttaccgcctgttctataatatccacgattgtcatgggagtaagtccccctactattatgtccggcttaaggcgcttttttataatttcttctatgaaatgcttcttggcggctacatcattcctgctgacacagaacaaaataaaagtctttcatccatcaaaaaagtgctggaccacatccacgaacattactatgaacccttgaatgtacgggatttaacggcactttcaaattacagtgaatattatttcatgaagctcttcaaacaatatacgggaaagacgctgatttcctacatgaatgacctacgtatagaaaaagccaaacctcttcttctgcattccgacgcctccatcacagagatcgcactggaggtaggctttaacaataccagctattttatcaaaaagtttcagcagacaaacaaaatgtcccctcacaaatatcgcaaaaaaatgtcataagggaacaggattgttgtattttttcccctaagtcagatgctattatatctgtgcaaaagcaaaatacacagatttctgaaaggagaaaaatcaatatggaggctttaaacactctcataagggacctgtttggcaaggactgccgttcctgtacaaatgaagaactttatgcagcattgttaacttatacaaaagaacaattaaagagtaaaggttaccaggacgggaaaaagaaactctattatatttctgctgaattcctcatgggtaaattattgtccaacaatctgatcaacctgggcatctatgacgaagttcatgcatatctcaaagaaaacgccaaatccttaagtgaaattgaagaagcagagccagaaccatccctgggcaatggaggtctcggccgtcttgctgcctgttttctggactccattgccactctgggtctgcctggtgagggaattggcctgaactatcatcttggtctgttcaagcaatcatttaaggacaatcttcagtatgaaactcccaatccctggatcacggacaatacctggctcacccccgctggcatctcctataccgtgccttttcgtgggtttaccctgaaatcctccttgtacgatatggatgttgcgggataccagaataaatccatccggctgcgtctttttgatatagacattgcagacgacggaattgtcacagagggaatttcttttaacaaaaaagatatcctgcacaatctcaccctgttcctctatccagatgacagcgacactgacgggcacaaactccgcatctaccagcaatattttatggtgagcaatgcagctcagcttattctggatgaagcggtgagaaaaggctgcaccctccatgatctgccggattatgctgtggtccagatcaatgatacccaccccagcatgatcatcccagagttcatccggctgctcacccacagagggattgaatttgaggaggcctgccagatcgtatcccgtgtatgcgcatacaccaaccataccattttggcagaagccttggaaaaatggccggtatcctacctggaggatgtagttccccatctcctgcccattatccgaaaactggatgagaggataaaaaaacaatatccccaggaatctgtggcgatcattgaccgaaataaccttgttcacatggcacatatggacatccactacggtttctccataaacggtgttgctgctctgcacacagaaatcctgaaatccagtgaattaaagcccttttatgacatctatcctcagaaatttaataataaaaccaatggaatcaccttccggcgctggcttatgcactgcaatcaccctctcactgcgtatctctcctcactcctgggtgaagggttcaagaaaaattcctttgaactggaagcattagccagctataaaaatgatcaggcggtacttgaccagctgctttccattaagctggaggcaaaaaaagcctgcaaagcttttcttctgtccaatacaggtatagacattgatgaaaacagcattttcgatattcaggtaaagcgtctgcatgaatataaacgccagcaattaaacgctttatacatcatctacaaataccttgagatcaaaagcggcaaaaaaccggtacgtcctgtaacttttatatttggggcaaaggccgctcccgcttatgtgatcgccaaggacattatccatcttctgctcactctccaggcgcttattaaaaactcaccggatgtggctccgtatatgaagctggtaatggtggaaaattacaatgtaagtgcagcagagaagctcatccctgcctgcgatatctccgaacagatctccctggcctcaaaggaagccagcggcacaggaaatatgaagtttatgctgaatggagccgtcaccttaggaaccttggatggagccaatgtagaaatctgcgaccttgttggaaaagaaaacatttacatctttggccagtccagccaggaggtgatcgcccactatgaaaaaggcgactacaatgcccgggcaatttatgaagggaatgaaaaaatccgcacttatgtagactttctcgtgagtgatgagatgctgcagcttggacacccagaacatttaagacggcttcataacgagctgataaataaggactggttcatgaccttattagatctggaagagtatattcatgtaaaagatcagatgctgcaggattatgaaaaccgctgggactgggccaaaaaaatgttggtaaacatagcgaaagctggttatttttcttctgacagaaccattgaacaatacaacaaggatatctggcatcttgtttaagtaagatttcatcataagacgcacaggacaatggaattccttgggaccccaatgtggttctgacagagcatttatatataacaaaagacagggatttttacatttttgttgaacacaccaatgtaaaaatccctgtcttttgttatttgatacgcctgtctaattattatcttagaagggaagaccgcctcccaggccgccgcctaaaccgccggtgagctttgacatcacggctgtgctctcctcctccaccttacggatggcctcattggcagcagccacgatcaaatcctccagcatttcaatatcatccggatcaaccacctccggagaaagctttaccttagttacttcacgcttgcctgtgatggtcacctccacggcgccgccgccagctgtggcagtaaactccttctcctccagtgccttctggttctcctccatctgacgctgcattttctgggcctgcttcattagattgttcatatttccaggcattcccatgcctccgggaaatcctccgcgttttgccattttaaaatcctcctgtcttatcattgtatatcattatataggaatgtatgccaaaagggaagctgcgtactacatttccggctcctcttccacaacaacatccatatggatattctctttgatggcctgatccacagttatattgtacagtcctgtcttctgatgctgatgggcaatgagaaactccacctcaacggtcttacctgtctgccgctggatgatctctcgcagctgctccttcttatccgggtcatccagacaggtctgggctaaaaagtcctggaactccacatagagtatgggctccccattctctccattatacttgggaaccgatttaagcagcatatttttaaacagtcctgaggtttcccctatgatcctgcgccatccggccacaattttctgaagatcctccggtgcggccttgtctggctttttctcaggctcctgctgctgtgtgccaacgggactgctgcctgtggtgtggtcctgggtctgtacatacacctgctgaaccggacgttcctccatctggcgctccaggacacggatcctgtccagaactgaattcaggtctgtctccatggccggccggcacagcttgatcagagccatctccaccagcacccgcttctgggatgcgtaacggatctggctggaaagctctgaaaatatacggatataccgcatcaaggcagcctcatccagcattcggctctcttcctgaaggagtttcagtacctcggaggacacatcaatgacctcctgggcattgtctgaggtcttcaccagaagaagatttctcatataccaggtaaagtccgacacaaactggctcatctccctgccgcccaccaccagctcctccaatatatggatggagcctgtcacatctcctgctgccaccttgcgcagcagctggctgaacacctccgtgtccactgcccccagcaccttcagcactttgtcataggtgagggtctcccccagataaaaggcaatacactggtccaaaaggcttaaagcatcacgcatggagccgtctccggcctttgctacataacgcacagctttctcctctgcctggacaccctccgcctctaataactctgtgagccgtgcagaaatggtgtcaatggtgatccggtgaaaatcatatctctggcatctggataggattgtaataggaatcttatgcacctctgtggttgccaaaataaagatcacataggagggtggttcctccagagtttttaaaagtgcattaaaagcgcccacggaaagcatgtggacctcatcgataatatagaccttataccgcccctgtgtgggccggtaggccacctcctcccggatctcacgaatattatcgacgccgttgttggaagcggcgtcgatctcgatcacattcatagaggtccctgcctggatagccctgcaggtttcacattcattgcaggggcttccgtccacagggtgttcacagttcactgcctttgccaggattttggccacagaggtttttcctgtgccccgggtcccgcagaacaggtaagcatgtcccaggcggctggccttgatttgattggttaatgtttttactatatggtcctgcccctttacatcctgaaaattgtcggggcggaactttctatacagagcagtatagctcatggaatcatactcctatctattgtccgtttcttaatcgccaaaactgattccaatttgttttgcagcctgaacaagctggtcttttggagataccatttttaattttccggcacactctgccaggggcactctcttgatcttgttatttacaacacccaccataatgccgtaatcttcctctaaaatcgcctctgccgccccggctccgatccttgtggaaagcactctgtcataaggacagggctcccctcctcgctgggtatggccaggaacagtgatacgcacctcgctgccagtctccttgagaatcttgtcggcaatctcataagaaacagaaggatatttcttcacccgctcctccagcttttctttgtatttcttcttggaaagctgtgcgtcctctttggatatggctccttcagcaacagccaggatggtaaagcgtttgcccgccttggccctcttctggatggccgctaccaccttcttaatgtcataagggatttccgggatcaggataatgtctgctccgcctgcaacgcctgcatgaagggtgaggcttcccaccttatgccccataacctccacaataaatacgcggccgtgggaggctgcagtggtatggatacagtcaatggcattggttgcaatattcacggcgctgtggaaaccaaaggtcatatccgttccccagatatcgttgtcaatggttttcggaagatggatgatattcagaccctcttccctgagaagattggctgtcttctgggttccattgccccccaggatcaccagacagtccagacacaatttatagtaggtctgcttcatggcttctaccttgtccaggcccttttcatcaggcaccctcattaatttgaagggctgacgggaggttcccagaatagttccgccctgcgtgaggataccagaaaaatctttggaggtcagcatcctgtattttccgtagataagtcccttgtaaccatcatcaaagccatagacttcaagctcgtccaggctgttggtaagccccttcaccacacctctcatggtggcgttcagtgcctgacagtccccgccgctggtcaataaaccgattcgttttatcatactattgcaccccgcttttcttcaatatgtttttattatataatactttctatattctctcaacctaaaattgcattggctccttgacaaatgcctcaaagacctctataattaaattctgcgcagccggggagatagcggtgccctgtacctgcaatccgctacagcaggggtgatgccaatctgagggctgttctttgtgaagctgccctttataagtggcgttgacgctcgggtcttacgcaacagaactctatgaaccgtgtcaggacaggaatgtagcagcactaaatagagccctctgtgtgccgtgagggtgcctgggccgagttaactgtaaaggtaacgtttgtgaaggcagttcgaggtgcggcgcgcataaataagtatttccaaaagatgcctggattatggcatctttttttattccataggacttattcaaatgcaacgccagccttgggggatcctgccaattggtttaaaaagattgacggaagaatctttgaagttaagttgacacttcccccgggacaacgttataatctaagaatcaaccttcagtttttttcgtgaggaggaactgcgctttggaaaaaattattgcagcgatttcactttttattatctgtaccacagtaacatccgcaaatcccctttgggaactgccggatcagatgaatgctttcttctttatggactccgggaagattctgaagaattctgagaagactccggatgggccgtctggtccgtcaaaggatctccaggaacagccaaaggatgaagcagaggaacaaaaagaatcccaagaggaatacatgccggatatggcctctctggatgtgccggagattttacagaatccggagctccccacaggctgtgaatccgtagccctcaccatcgccctgtcctacaaaggctatgagctggagaagaccaccatcgctgaagattacctggtatatagtgattctgagaattttgcagaaggctatgtgggcaatccccgcacagactccggcaccggtgttttcccgcccggactggccgccacggcggacgcctatctgaaggcccaggattctcatgaaaaagcccaggatatcagcggttctgatttccatgacctgctggcctatgtggcagaaggagagccggtggttgtatggaccaccatgtatatgatggagccagaattcacagaatttaccgctcagagtaagaaccgcacctatacctggtatctgcaggaacactgtgtggtcttatgcggatatgacctggaagaaaataccgtaacggtcagtgaccccctggaaggagtcctgaaccggaacctggatgaattttcccgtatttatgagtccacagggaaaaacgctatgatcattcaatgacagtaggagggagctggtctcccttcttcttttttttcttttctctgagttctctaaaaaaactggagagcatttgggagcattcttcctccaaaactcccctgctcacctctaccttatgattaaacccatccatttccaatagattgagaaccgaacctgcgcaccctgccttgggattcatgctgccaatgaccacgcggtcaatcctggactggacaagggctcccgcacacatctgacagggctccaaagtcacatacatggtacagccttccagtctccaatcccccagctttttgctggcctttcggattgcgttcagctctgcatgagaaagggtatttttgtcagtatttcttctattatagccccgggcgatgatctttccctcatagacaatgacgcatccaataggcacttcctccagggcataggcttttttcgcctgccggacggcctccttcatataacgctcctcttgtgtcataggacaatcctcctgaatttttcatccatcagccggatgcttgtccggcaatacctgcccatcattatatcacggagccggcaggtttgcacttgtcaaatgaagaaccaaaggatagaataaacttaaccttactgttccctggggatccggcagcacgcttcatggggaatataaccggtgatcagtaacaacccaatgacaatatgcctgatatggaggattatttatatgaagatatgcggatggaataaaaccacgcttttggactacccaggaaaagtggcagctaccttgtttctgggcggctgcaattttcgctgccccttctgccacaacagttctctggtcataaatgcccaagacacaccagagatctcccgggaggagctcttttcctttctggaaaaacgcagaggaattctggacggagtatgtattaccggcggggaacccacactggcccctgatcttccagagcttatggaaagtatccgccgcctgggctacagcatcaagctggattccaacggaacccgtccccatgttcttagatatctcatagaggaaaatctggttgacatgatagccatggacattaaatcctccccagaaaactatgcaaaggtatccggcatccgctatcccggaatggatgaaatccaagaatccatagatctgcttatgaagggccgggtggattatgaattccgcaccactgttgtgcgggagctccacagcgagtctgatttccgcaccattggaaaatggctggccggggctaaggcatacttcctccaggcttacaaggactctcctgaagtcctgaagcccggattcagcagctacaccaaagaagaactggagcacttccggcgcattctgttaaaaaccattccgtcaacgcagattcgggggatagattagacgataccaataccctccttttccctgggggagttcaatatagggactgtacttaaagtgcgggaagccgaacatgtttgccataaaccgctcctgctggtcataaagtccgggaactcccagaatgtactggccgtctctcagcctgcccacgataatatgtccgaaatgatagaagccgtacaggaggaaacggttatttctaagagcccagtcccttctgttcaggaaggagaaatcccttctgtccatcttcctgcactggatgatctctccatcttcaaaaggatcaaaccctgtatttatctggggaatctgctcctgcacaggctgcgtctccgactcctccactgaagttccctgcagctccggctggctggtttcctgtgagtctggtgaattttgattctcaagctgactggctggctctggggcagaggggctttgcttctcattctggctgacttcgtctgagacaggtggactttgctgttcacattgaacgccttcttgcaaggcaaaggaattttgcttctcaatttctgcctgagattccgccgtgggttcacttcctggctgtgagatggactcctgaaccatgggacttatgtcctggggagtgtcctttggttcttgttcattttggctgtccggttctgttgactgattcataccatgttcagcattacagtatacttcttctgatgctgcctggatggaggctggatttgccgatgctggccttgggcttgtaaaatcctgctctgtgccagattcaacatgggctttgtctctttttatctgctgtgaaactctcgtttccatttcatctgactcttcctgatccaaggacggcacttcctcttttaccttgtcttgggaaggatgaacttcctctccttcttccggttgttcagccatgtgagtatcctgaaccttctcggcagtctgcggctgggttctttctttatttaaatcctgtcctgaaggctcttcctgtggtgtttcacttcctgctgaagcttccggttctggccatgaaaccggctgccgggacggaggttcattctgcacagcagaatccatcttttcttcctgcttctctggtaccatccctttttcagggtgcatttccacaaaattttccggccggataggcttttcatcccactgggttccataaaacccgccgccttcaataagaaggaccatacctcccagttcttttaaggacaccttacttccatgaagattgtccgcatcggtttccaggaaacactccgccctatcctgctgagtctggcacacccccagaagaatccctgccatctcacctcttctttgcacaaagccgtagattttacattccatgtcaggggttagcccctcgcattttaaatgaacctccatgcggcatttcccgtctctggattctaccttcacaaagccgcagttgttacccttcttgcctttccgatattcatatacataggctacaaaccgttgatatcccgtcaatgaacaccctccgttattttccttgaactcattaatatatatgtaaaaatattcttttcatgcccatcaactctgtttttcatcctttccacgacactggacaggtaaataagaaagcttcctacagaaatccacgaagacaccttatggaatattaccagtatacaataacgttacctttccaaatgaagctttctaattcagctcttttcacttcagccctatccaatcccctttctaattcttttaatatttttagtttttctattgacaaaccctttattaattaatataatatttattgcatgtgacgaagcgtggctcagtttggtagagcgctgcgttcgggacgcagaggtcgcaagttcgaatcttgtcgcttcgactaagtgcagaaaagcctggaaatctaatggtttccaggctttttgtttgttttaccagattaacataatgctatccaacggtgttcggaaaggtgttttacgaacatctttggggcttgttctattttttgcgcaagtctattctaatattccaatccagcgaccggcattgttcctcaaagctctcccagccagcactgacccttctccagctttagagtaaaaatcttggcattgttcgcgtctttctttgcctggtggtatttgaagagcatttcatcctctcccacctttcccaaaatctcaatttttcctgtgggatgtgacatggcatagcgcacgctttttgactggccattcatgtacttcttggcctcatccacaattgcagatccctccagcaggggaacctgaaattgattttttaccccgatcaccggccggcactggaatatgtaatagggcaggatgccgtttttgaccagagaattcataagctgggacaagatttccggcgtgtcgttcacgccctttaagaggacggtctggttacgcacaatacagccctgctcccgcagaagttttacagaaagaacagcctccggagtcagttctcttggatgattgaactgggtcacgatcatgagctgtttcttatgggaatagttcttcaggagcataaggagggcctcatcctcaatgatcctctggggaagcactacgggaatacgggtgccgaagcggataaaatccaaggtaggaatatctgtgagagtctccagatatttttccagaacctgcactgaattcataaatgcatctcctccagagaccagaacattgttaatctctgggtggctgcggatataatctgccatggcaggcagctccctggcaatttcatcactggaggtccccaccagccttttccgaaagcaatgtctgcagtacatggcacactggttggtggacaatatgagcacggtttgtttatatttgtgctggagtccctgcataaccgtattgcttccctcgccgctggtatcctcttctcctccctgggaaaactccatggcacttggcacacacattttccgaatagggtcttgtttatcctccgggtggatcagggacaaatagtaaggggtcacacatatgggatacttctcctctatttccttcaaacgccggacttcctcttccgtaaggccaagaagctctttcaattcttcaatctcccggcagctatctcttaacatatctttccatcccataaaatacctcctttgttacaatctttatcttatgcatcctattatactgtattattgtagcacattaacaggtgaagggcaaattgtggagaacatatttctgtaaaattaacagatttttttcggaaatttaatattttttatcaaaaatgacaaatgagcttatgggaaacgacgctctggcttttgccaggtatttacaatggcttgggagaattattttcagattacagaaaaaggcccctgccctagaaattttaaggagggcaggggcctgatacagtacagatcctaaatctctgctgccaaggtcttttcggatggcagattttttagctgccaaggccttttcggatggcagattttttagtttgatgaatgagggcttccagttaacggattcccaataaatggtctacatactctttgtgaagggagtccagctgtcctgccaggttcatgagattctgggtattttccagaacctccggatcatctgagctctggctggcattgtcccagcctttgccgtctgtcatgatcacaagaatatagggatatctcccgtcatccacaatgcctgcatcgtcaaaggcatcataaatatgttcctggttgtatccttcgttaaaaccaggcttggtatataccagcttacttttttccagcttcatgcggataactgaagattctgactgtgtatatttttccttcagccactgggcatttggggcatcactgtcaaaatagctgtccatgcggatccacatttttgccaggtccttggcagtgagcataggatagtcagagtctcccagggccgggtccacgcctgcgtccttcagccactcacggaaggtgtctgctccaaacttctcccggagcatggcatatcctacatcgtctgagtaccggatggtttttgtgatcatctcatccagtgtgtaaactgtatcctctgggtcaagcttgataatgccggttcccacactttgtccataatcactgcgccggaacatctcttctgtcagggaaaactcctgggtatccacataattttctgccacattggctatgtaaggtcccttaatggtgcttgctgaaaacaggaccttgtccggctgataataatataccgccgcagtattcaggtccagcattaaaaagcttaagttctggcccttcttctcaattttctctatacaggccttcaggtccttcattctggaatcctctggggtataattggtattcagcttctgaacgccttctcccgctgtcatgttgtccaccgtgaactgaagggtccggggaggaattttttccgtcttggcaagcctgggacctacaaaagtctcctcggtcacatccggtgcaatatgtaccaattccggccttacctcttcctgttgtgattcttcctggtttaattcttcctggtccgattcttcctggtttaattcttcctggtccgattcttcctggtttaattcttcctggtccgattcttcctggtctggttcttcccgttccgcttcttcctctcggcctggcggctgcttttcttctttctcagcgttctccggctcagccgcttctggggaaggcgctggaggctcctggtccatggtaagctcctcgtgtataatgttcagcaccctcaccagtctcataagattgtctttattttcctgcacctgggcagtatcctgggagttggaagcctcgtcccagcccgccccgtcagacagcagggacagcacataggggctttttccgttatccaccaggccgccgtcatgaaaaacattgtatccatcccgggagctgaccatatagcctggtttggaatacacagtgtattgaccgcccagctcagccttgatcaccgatccctgagaatcccggaaacgcgtgccaagccagtgtgcgttgggggagtccccatataaatattcagaaatgccttcccacatttttgccagatccactgcagtaaacatgggataatccgtatagccagacagatctgtgattccatgatcctcataccacttggaaaatccctctcctccaaacttacggaacagcatctgatatccgatattatcagaatcatggatggtcctggtgatcacctggcgaagagaatacacagaatctgccggatcatcttttatcattccggttccgccgatatactcgtagtcgcctctgcgaaagcttctgtcatccagggacgccttctgggtatccacataattttccatcacctgaaccacatagggcgccttgatggtgctggcggaaaaatacgacttgtccccattatagtaaacgcatttcccgctttccagatcctccataagaaagctcacactctgacctttttcttcaaaaaagccgatggcgtcctccagggcctgcctctgttccttggtcaagtcagcttccagtccctctgtctggatctggcttcccccctgaattctgtccagtaccttttctgtggctgacggtgcgcctaaaacacctgttgggaggagcaccacccccaacagcagggatcccagggcttgtccgattctttttttctttatgggtgtcatgaatttcctctttccacaaataatctccacattctttttatgataaaacaactggaaatatgctagtatcaaaaaatttaagctggcattttctctaaatcacacagcctgacaattatagcataaaactccatcatttaaaagacgggacaaaacgttctccgggcatccccctcatatataagaggaatgcccagaaaattgacacacctgcgaaaagtactgacagttccatatacgtatgaatggatggaactgcttgactgccgcctgttaaacaagtattacatttctcttttcaagaaaaacatcccatcttctctgtggatgagttcccagccctcagctcccaaacggttgagctccttctcatactctttcgccgcatcctcaaaatgcttggcattcataactattttagctgacattggaacaactttatactcaaacttcttcatttatgcctccttcttgtttaccaacttctattgtttactattatatctttttccggcaagataagcaaatccttaatacagtgatcggcaaagtattttcattacatctccggttatggttagaaagcagaaagccactgcctccagcagcacttttccaaagaaaatactgttgtgggcaatggcctgttttcagtaagatttcaatattcctgacttttaattcaactgatacacttccgcactctgaagtccaaaggccagggctgcgtcatggctgtcaaagtaaatgtcaacatgtccataaggagttccaaggtcttccactgtatacaccactccgttgatcagaagctgggttccgaaaggaactcctgccatagccaccgtgtggcctgcagttggcatcactccgctggcggtgggctgtccggctgctccgcagcactgggcacagccgcaataagcagtcaaggtaaaggtccccagataggttccctggccgctgtcaccgctgccttcagttcctgcatcagttcctggctgggtctcctcaccttccgaagggagggtttcctgaccgttgtccgtaccgtctgctgcttcctgagagggcacgtcctggcttccgtcctccggtgtatcctgggtatccccatagccggtatcttccccgctgggggtttccactgatacggatacgtcactgctggttccgctgctgctggattccaatgtatcttcttccggattatatccctctggataggagggctcaggttctgtctgttccgggtccggtgtttcctgggattcctgtccctggggcacctggggtgcatcccctgtatctgccaaagcctccgatgcctgagccggttcctgctgggctaccaccagaagtgcgttcatggcctgctctgactgagcaatctggtttaccagcatctgtgcctcctcttcattggcagcgatctcctgtgcatatgccataatgttgtcattggtggacgccaccatatcccgcacttcctgctgttttgcagagctctccacccggagggcgttgatctgctccacctcttcttcaatggtgcgctctttctgggcgatctcgttctttgtctcttcgtactgcttcagcatgttccggtcataatctgtgatctgctggatatattcagcctgattgagaaattctccaatacttttgcaggaaagcagagtctctagataagaacctccgcttttctcatacatgtaggcaatacgcagcttcatggcattgtactgctccttctctttctgtctggccttagtcaattgaatcttaacctgcttgagttcctgttccttctgtcctgccttcagcgccagctcctccacaccacctgtgagctcttcatactgggcactcaggtctgtgagatagccttccagttcttgcttcttaacctctaaattgctaatggcctgctgtgctgcagccagatgatcctcacttatttgctgctgtgcctcaagactgctcagttcatcctgggcgttggcagccataacagaagctggggctgatatacttaaaattcctgctgccaaaaacggcagtattcttctgatcttcatagataatcacacctcgttttcttttttcctctcccagtataacacatctttgcaaaaaatcaatccttttgttttatttctgtaatatttatgtaacaaactgccaatgtttctattctaaagaatcagagccatgacaaaagattcagagcaactgctaatttttactttgcaattacatgacaaaagtttgttttaaatttctctacaattacataaactaatcctagctcaaaacaacgaaaccgccccaagtaagtcttgcgtatttaaaccccagagactcaaaccaggggcaggggacttgctcctatcaggaagaggtaatctatggacgaaaaaagaagactacaatacagaaaacttggactgacaatcgcctattaccggaaactgcggtccctgacccaaaaacagctggcagatgccgtccatctcagccgcacccacataagcaacattgaggctcccaatggaaaaacatcggtatcattggataagctttttgatattgcagaggttctggaagtagacgtgatggatctgttccgtttcaccggcacaacaaggacctccccaggaagcagaaaatacttataaagccgattcgtttcataaggaaaacatgaaaaaagagacctccgcacccctacgaaggtctctttttttcgctctctatccccacaattgcatgattatcatatagtttttatgttttcctatgcttctgctgctacagccgcttcttccggctcggtagccattacttcttcatatttttcaagaatgatattttggattctttctcttgtcccggagttgatgggatgtgcaatatccctgtattctccgtctgtagccttccggctcggcattgctataaataaacccttctctccctcaatcactttgatatcatgtacaacgaactcatcatcaatggtgattgaaactactgctttcatttttccctcttttgctactttgcgcacgcgtacgtctgtaatgttcatagcgtatgcccctttcctcgctaattgctccgttttaaaccactctcagcttttataaaacgtagcgctcgtttttctcaattacaatttttatctcgccttcaccacagtggtaagagttcgctctgatcgtatcgcggctttccacaatacaattctcgatatgagtgttatcccccagataaacctcattgagtataatggaattcttgatcacacagttgtttcctacaaatacatttttaaacaaaatggagttttccactgtaccgttcacaatacatccgctggccaccagactgtttttcacaactgcaccgggattatattttgcaggaggaaggtcatcaatttttgttttaacagggggatcctgtttaaagaaataattgcgtacctccggctccaggaatgccatatttgtgttataataggcatccacggttgagatattgctccaatactggtcaatcttatagccgtagatcctcttcagattcttgtaacggatcaaaatgtcctttacaaaatcatatctgccctcctgggcgctcttttcaataagctcgatgagctgtcttcttctgatcacatagataccggtggaaaccgtgttgtactgggaaaccataggtttctcctcaaattcctcgatccggcagtcttcattcatacggagcacgccgaaacgctccacctcttcctggttcttgcaggtggtgcagaccacggtgacatctgcccgttttgcaatatgatattccagaaccttgttgtagtccagcttgtaaataccatcgccggatgcaatgacaacataaggctcgtggctgtttttcaaaaatgtcagattctgataaatggcatctgctgttccctgataccagaagctgttctccttggtcacagtaggattgaaaacaaacaggcctccctgctttcttccgaaatcccaccatttggaggagctgagatgttcatttaaggaacgtgcattatactgggtgagcacagctactttctgtatatgggagtttgccatattgctcagggcaaaatcgatactccgatagctgccggcaattggcattgccgcaattgctcttttatttgataattctctcatgcggttattgttaccgccggctaaaataataccgattgctctcatgcaacgtcaccaccctttctaataatgcctccgcttacaagctctttgtcaggatagtctccgctcactgttacgcctgaaattgcggtgtttttaccaatcttcacgccgtcaggaatgacagagcgctcaccgatggtagcgataccgaatgcatacacagccggcttctcaacattgggtgcttcttcgccgcagcccagaacacaattcttgccaatggtaacatcctcggcaacaatggtcttgtccatcacggtcttttctcctattacagcatttctcataataatggaatccctgatgacggcgcccttttccacaataacattgggtccaatgacggaattatgtatctctccatagatctcagagccttcgccgatcagacagcggtcaacgacagcctcctctgatatatactggggaggaataatatcgccttttgtataaatcttccagaattcttcgtagagattgaactcaggaataatatcgatcagttccatgttggcttcccaataggagcctaaagttcccacatccttccagtatccattgtactcataggcaaacaggcgcatatccttgtccttgcagtaaggaagaatatgcttgccaaaatcacagccattctggtcctttaatgcgatcagtgcatctcttaagaccggccagctgaatatatagatacccatggatgccagattgctgctggggtgttctggcttctcctcaaattcggtaatacgtcctgtatcatccgtaaccatgatcccaaagcggctggcctcctcaatgggtaccggcatgcaggcgatggtgatatctgccttgttagccttgtggaaatccagcataacttcgtaatccattttataaatatggtcaccggaaaggattaaaacataatccggattatactgctccatataagccaggttctggtaaatggcgttggccgtacctgtgtaccactcgctgttggtgcttttctcataaggaggaagcaccgtcactccgccctcgttcctgtccaaatcccacggaattccaattccgatgtgggtattcaaacgcaggggctgatattgggtcagtacaccgacagtatcaattccagaattgatacaattactcaaggggaaatcgataattcgatattttcctccgaaagcgactgccggttttgcgactttttctgtcaggacaccaagtcggctgccctgaccgccagctaagagcatagctatcatttctttcttaatcatgcaatcacctcttgtacgttatgatttatcattatatcatacttctttccattagtgaacattttttacaattattgtgatattttttcttactttttatggttattgtatatttctgaattatggaattttattctttctgtacttttttctacaatttcgacatatttctcgggtattttttcgttattttgtcatatttatacaaattgcgaccttttttcttttccttcctccattttaaatatttgaactatatttgatgtttttcccatacactttaacatggattccaccggaaaagtcataccattttcatccattttaagagctgtctgcacactgagcaccggggtattcatgagatggaggcacctggcagatccgccctggctgcgggactttcggattaaataagtacttttatttttccaatgtaagggttataatacttttgtatttgagaataaagcacgaaggagtcaaaccaatgtataatatcgacttttcacgccccttacatatccattttatcggcatcgggggaatcagtatgagcggacttgcagagatccttctgggcgagggttttaccgtcaccggttccgattccaaggaaagccctctgaccttggccctggagaaaaaaggcgccagaatctactacggccagaaagcctccaacattgaagcttctgtccagctggttgtgtacacggcggccatacacccggacaatccagaatatgcggcagcagtggacaaagagcttcccatgctcacaagagcccagcttctgggacagatcatgaaaaattatgacacacccatcgccgtttccggtacccacggcaagaccaccacaacctctatgatctctcacattcttcttgcaggggactgtgatcccaccatcagcgtaggcggcatacttcccgttatcggaggaaatatccgtgtgggccagtctgagacctttgtgacagaagcctgtgaatacaccaacagcttcttaagtttctttcctaagatcagtatcattctgaatatggatgcggaccatctggacttttttaaggatctggacgatatccgcagctcctttcgccggtttgcacagcttctgcctcaggacggggccctgatcatcaacagcgatacaccaggctatgagcagatcatccagggacttccctgcaaagtgatcacctacggactggaacacagcgcccagtaccaggctgaggccatccactttgaccagctgggccgcccgtcctttcaggtactcaaagacggcaggccccagggagaatataccctgtccgtgccgggcatgcacaatgtatccaatgccctggcatccattgccctgggtgagcttttgggactgtctgcccagaccattcagaaggggctgctggcgtttacagggaccgaccggcgtttccagtataagggagaatgcaagggctttaccatcatcgatgactacgcccaccaccccacagagatacaggccaccctcacagccgccaaaaactatccccacacaaagacctggtgcgtcttccagcctcacacctatacccggaccaaggccctgctcccggaatttgcccaggcgctttccttggcagaccatgtggtgctggctgacatttatgcggcaagagagaccgacagcctgggaatctcctccaaagaccttcaggaacgcatcctggcccttggaacaccctgtgagtattttccttcctttgaagaaattgaaaaattcttattagaaaattgtacaaagggagaattgttgataactatgggtgcaggagatgttgtaaatatcggcgaagacctgttaaaacaatagttatccacattatccacatgcttatacacatttttgtgtccccaggcatgtggatttttttgtgcataagtagatttacataattctgttccaaaatttcctataaatcgtgttctcctgtgctttttcgacattatacagttgcagataaaatggttatccatattttatccacattatccacatttttttccacttttccgttttattttccctttttttctttcgtgaaaatgcctattctttttcccagaaggttatgctataatccaggtacatctaacaagaaagcgagcgttatatatgggcaacatcaaaatcacggccaaccacacctcccaagtgacggtgttatccaataaattcatagactgctacatgccggaagccaacggggaatttgtgaaggtatatctgtatcttctcagaattcttacgcagactccggcctctttcagcctggcttccatggctgaccatttaaactgtacggagcgggacattgtgcgggcattgaggtattgggaaaaggaagaacttattgccctgagtgtggatcaggatgccagtctctgtggggtacttctgctgcccattcctgacagtggggaaactgccgtggaagctgcccaggaacctcctgtgctccaggagacagagaccgggaaggaggccccctccaaggacacctccgatctccttgggccgccctcttcccaggaacgccccaaaattcagatcacccgccagagacgggcggagctctctgagatcgacgatatccagcagcttctgtttctggcggaacagtacctgggtaaaacattgagcacctccaatgtggacaagctgctgtacttttatgacaccctgaagttttccgtggatctaatcgaatatctcattgaatactgtgtatccaaaggacatctgagcatgcggtacattgagaccgtggccttcgcctgggcggacaagggcatcacctctgtggaacaagccaagcaggaagcccatctccacaaccaggaatattatgccattttaaaagctctggggatcaccaacagaaatcctgtggagtcggagatccggcttatggacacctggcgcaaggattacggctttcctctggacattattgcccaggcctgctcccgcactgttcttcagaccggacaggccagcttccagtatgcagaccgtatcctgtcccagtggaagaagaatggcgtgaagtccatggcggacattgagaagctggacctggagcatcaacgcaagaaaagtacccgtccggctgtggccaagaattcctcctccacgcccaaccgttttaataattttaaccagcgggactacgattttgaggaatatgaaaaacgtctgctgaaccagtaaccgtttttttcaaaaggaggcccgttcatgccattacagaacattcagtacgacaccattatgcgggaattcaaccgcagacagcttaagaataaacgggaccaggaagcccggaaagaggaggcctacaaagcctgtccccgtcttctggagattgacggggaggttgcggccaaaagcgcggctaaagcccgttcccttctgaataatcagagcacggatatctctgatctaaggcaggagattgcccttctggcagaggagcgcagggcacttcttctctcccacggttatccccaggattacctggagcttcactatcactgccccaaatgccaggatactggttatgtgaatggccggaaatgctcctgcttccgccaggccgagatccagcttctctatgcccagtccaatctgaacgaaatattggaaaaagagaacttttcacacttttctttggactattattctgatacaataaaaaatgaagcaacagggctgaccgcacggcagacagcacagcaggctttacagaaagcggagattttcgtgaaagtattcggcacctcctttcggaatctgtttctctatggagacaccggggtggggaagacctttctctcccactgtattgctcacgaactgctggaaagggcataccatgttgtttatttttctgcatttgatttatttgatatgttcgcacaaaatacgttttccaaaaatgtgtcccgggacatactggatgattacattttccagtgtgacctgctgatcattgacgacctggggacagagatgaccaacacctttgtgacctcacagcttttcctgtgtatcaatgaacggatcatggggaaaaagtccacgatcatttccaccaatctgaccctggaacgtttttccgaaacttattctgagcggaccttttcccgaattgcaagtaactatgacatgataaaactcatcggcaaggatatccgaatccaaaaattattcttaggaggaaagtaatcatgggacagtcaacgacaaaggatttaaatacacttcctgtaggcagactgggtctggtagcgatggaaagctgcggcgacctgggcagcaacgtagacaggtggctggtaaaatggcgcagggaacgtgaaaatgcttacaaggacacattagcctttgaagggtatgagcgagattcctacctcatcaaagcccagaccccccgcttcggttccggggaagccaagggaatcatcaatgaatctgtccggggtgatgatgtttattttatggtggatgtgtgcaattacagcatgacctaccctatcggagggaaatttaccaatctcatgtctcctgatgaccatttccaggatctgaagagagtcatcgccgctgtcagcggcaaggcccgcagaatgaatgtgatcatgccttatctctatgagggacgtgtgagcaagcgcaacggccgggaatccctggactgtgccacagctcttcaggagctggtgaacatgggtgtggaaaacatcattacctttgatgcccatgacgcccgtgtccagaacgccacgcccctgtatggctttgagaccgtgcagcctgcctatcagtttattaaaggtcttctgggccatgaaaaggacctgaccatagacaaccagcatctcatggtgatcagccctgatgagggcagcatgaaccgtgccatctacctggccaatgtactcggggtggacatggggatgttctataagcgcctggattactccaaaacagaaaatggccgccatcccgtagccgctcacgaatttttgggcgccaaggtggagggcaaggatatgatcctcattgatgacatgatctcctccggagacacggcactggagattgcctccttactgaaggaaatgaaggccaaccgcatctatatctgctccaccttcggcctgtttaccaatggcctgaagaaatttgatgacgcacatagggctggaatcttcgacaggcttctcaccaccaatctggtgtaccagtcaccggaactgctccagaagccctattatatttcctgtgacatgagcaaatatattgcgctgatcattgataccttaaatcacgatctgtccatcagccatctgctgaatcccgttgaccgcatcaaccggtatgtggccaactacaaagctgaaaacaagacaaaataattataggcaaagttatggggaggccccggaaatatccggggcctcccctgtttattcttatcccagacgggatatccgcaatccgctcccgctatctggttaggttgtgttcaaagtatacgattcccagtttgtctagaagctggatctctcttgtgtggcaggtggtgatgatcacctggcggccagactgctccagccagcgaaggacagcgcccaggcgctcttcgtcgtacatggcgaagacatcgtccagaacaatgggcatctcctcttcctcacacagaatatctcccactgccatacgcagggcaaaatagatctgctccacggttcccctgctgagtcgctccagagggatgctccgctccctggtgtggacggtgatctccaggttctcattcatatatacctgggtataccggccctctgtgatctctgacaggatctgggaggtacggcttcgcaggctctctccaatgcggttgtggagagaggcagatattctggtgatggtgtccatggccagattcagactttcaatgtccagctcctccggaagaggcttgcaggagacttcctcatactcctcataggtgctgcggagattttccagagtagtctctttttccttcagctcctgggtcagccgctcaatgttccatcgcagcttgtcctgcttctgaagccggcgggccctgagcctctggttcttattctgctcccgtcccagcctggtcatataaagggcgataaaaagctccagcaccgcacagcctgcaccccctgtgatctttccaatggtgggcagaagggccacgcaggcggctcccgctgccagcacaagcagagagagaatggtgcacaatacctttttcttcttgatcctggcaattctgcggtcataaatggtaacgatctccggctggcggagctcttcttctgaggtctcctcatcaggagaagggattcccagggcacttccctggtccacggcctgatactgctgctccctcaggtccgacacttctttttttaaatactccatcctgcccagaagattttcctggtctcgttccaaatcctcccgggaacgctctacctggacctggtaacccttccgccacattttcagagcctgcatggcccggttcagatcaatggccgcatcagcgcttccctgatagctggccatatagttctgaagctcctgaaccaagccctggttggtggcacttttcagctgggcgatagaaacggtattttcatacactgcctcgctgatatttcccagaagggcatccagatcgccgtcctcaatggacagaatctccccgtcatcctggcacaccagctctgcctgagaattccccttctgaaagtttctggtgaggcggaagctccggccctcgcactgaaaccaaatggtccccccgtaccctccttcactgtcccagggctcatatctggaataggtatcgttccgggaggctctccctctctgacgcaccaatccgaaaaacatggcctttaagaaggtgtgcagggtagtctttccactttcgtttggcccgtacaccacattgatccccggggaaagagggatatctctgtcatgaagttttccaaaattttttatgttcagttcttttataatcatgctttatttcccgttaagctcttgtctccagaagagcctggagaccataataaagtgccttttcttctgcctgggtgcgctcccggtcctggaaatacttaatatattccccaatgagggtaccatcatactgcttcataagccgctccagattataggccggccgggtctcatcctccacctggatcacatttcccagacgcttaaagcgctctgtcataagcattaattccggtgtccggacgccctttaagagcaccttgtaaatattctggcttcccttttcagcaatgtcctttttcagcatatcctccagggaaatctgggtggaatcctcccgcacagtgaggatctcctggatataagagcgggaggcaaagggcacgaaccgcacttttacacggccgtccttccactccccttccacatacccatgggttcctgtgtcattgcggtcaatgggctccagagcccctgcgtagactacccggtgccccaccaaagcctggggcttatggatatggcccagggccacatagtcaaaaccggcgcctgcaagcacctccccccgaaggggaatatgcctggcatcgcccccgtgggccaccattacgtgaaagccctcttcttccttaggcttaacaccatgataccggaaatctgtgatctcctgtttctcataactcagaccgtatacaaaggtcttcagcttaggcagctccacacaggtgcaggcagggtctttgatgaacagaacattctctgcccactccattttcaggtagcaggaatcttttcttaaataatcatggtttcccgccaccagtaccacctgggtgtcgggaatggtggtgaacagataattcacctcattcagctccttcatcaggggctggcggtggaacaaatctcctgctatgaatagcaaatccaccggattcttgcggatcaccgcaaaaacccggcggaaagtactccagatttcttctccccgcttctcactccaaggcatccccatatcgggcactgctcccaggtgtacatctgccagatgaataaatctcatatgattactccttgctttttacaggtcacagtttttcactgttcttgggaaggaaagtacgtcacggatattggtcataccagtcaaatacatgacacagcgctcaaatccaagtccaaatccggaatggcgtgtggaaccgtattttctcaggtccagatagaaatcatagtcctcttttctaagtcccagctcctccatacgtttttccagcttctccagactatcctctctctggcttcctccaatgatctctccgattccgggcaccagacagtccatggctgccacggtcttgccgtcctcattcattttcatatagaaggctttgatctccttgggataatcggttacaaaaaccggtcttttgaagacctcctcagtcagataacgctcatgctcggtctggagatcacagccccagaacactttatagtcaaatttctcattgttcttttccagaatctccacagcctctgtgtaggtcacatgggcgaactgagagttcatcacgtgattcagcctgtccagaagtcccttgtccacaaaggagttaaagaaattcatctcctccggggcattttccagcacatagctgatcacatacttgagcatagactctgccagatccatattgtcattaagatctgcaaatgcacattccggctcgatcatccagaactctgccgcatggcgggtggtattggagttctccgcccggaaggtgggtccgaaggtatacacatcccggaaagcctgggcgtaggtctctgcatttaactggccgctcaccgtaagattggtctcttttccaaaaaagtcctggctgtaatccacatttcccttgtcatccacaggagggttggccgggtccaaggttgtcacacggaacatttctcctgcaccctcgcagtcgcttcctgtgatcagaggagtattcacatacacaaagcccctgtcctggaaaaacttatgaatggcaaaagcacacagggaacggactctgaacacagcctggaaggtgtttgtcctgggtcttaaatgtgtcatggttcttaaatattctaaggaatggcgttttttctgaagcggataatccggggctgacgctccctctaccgttacctctgacgcctgaatctcaaagggctgttttgcctggggagtagccaccagggttccttttacaatgattgcagctcccacgttcagcttgctgatctctgcaaaattagacatattatcatgatataccacctgcagggtctcaaaaaaggtcccgtcgtggagaacaataaacccgaaggtctttgagtcgcgcacactccgcacccagccgcccacagtaatttctttgtcaaggaaggcttccctgtttctgtaaatctcttttacggttgtcagtttcattgctggttcctctttctttttttataatgaatcaagcttcttaaagctttccacaaataaggcgaaacccttattttgcaatggtttcgccttatagtatatcccattcccatatttcatgcaagccacacttttattttaccagagaagtttctccttttttgtgaaatcttcttccatggagtaaaggtacacacccttgctgcctgcggtataaaaatgatcacccacgtaaagtccccggatatcctggtagtcccccagtccctgggcggacaggtccagattttccataagctcctcttgaaagcccttttcctcatcataggaaaagactgcatagaattgttcaccctggttgtctgtgagcataaagccaatcagattcttttccggggcagccatcactgccttgtaattccaggttcccggacagtccgtgatattggaaagaaccagcctgtctgcctctttcacattttccttattggagatatcaaacatggacagcttcagtcccttctggattcctgtctccgggtctgtctcccagccaaggcccaggagaaggttttcaccatacacatggagatagtcggaaaaacctgtgatcttcagctcgcctaagatcttggggctggtgggatcactcaagtccacagagaacaggggatctgtattttcataggtgacaaagtaagccacgtctcccatgaaccgggcggatttgatttcttcgtttttggccagtccgtccacactgcccacaagctgcagattttcatccagcacatagacaccattggtgcgggagcctgctgcaaaattgctgttctctccatctgtactgctggtttcatatccccaggcagaggtgacgatccgcagatagccgttgtattcgtccatggaaaagctgtcattgatcagtccctttacatttcctgctgccactgcctgaatttttccgtccttataagagaaggaggccaggtctgtctggtcctgggaatcctcccaccgggaattggccacataaatatgctcctcgctcacataaaacagctccgcagaggataccagggcctttctgtccgtggcctcaccgggattgtctgcagacacagaggagatgaccagatagttcttaccgccatagcttggctgggtccagccaaagggcacatagatatcactgcattcaatgatctttgcgcctgcctcagggacaaaggtctctgcctcaggagtgatggtgcctgtgtttggtctgtaggaggtaaaaagatagatataagctccgtttttcctggaagacacataggcaccgtcctgctcatagctgccaatcttcacaggatttttccggtcgctgatatcataggtgaggacctttgtgatcttgcggttgtttacataatatacaccggtccactcctctgtattctctccctcctccagggtggattcatctgccgtgaccacaagctggaggatattgccgtccacatagaattcctggggctgttcatccaggctttccagctccagaacactttccaccttcatatgaccgtcctggatatccacaatggtgatacctttggaacggtccataaggtacaggtaatttccatcggttttcaccacatctgcctcgtctacattttcttcccgggtgttggttgccgaatagtccctggccacagcacctgtacccgtatctgcgctgctggctgctgaggagatgggaactactgcatcactggctgttgcaaattcctcaactccggtctctgacagtatctccttatggctgtattgatacactacatctgaaattttcatccattggtagatttcatcatagctcttggccacctgtactggggacgtattgtcctcctcctgggacagagctgtatctgagttgatgacggctggtgttgcctgggcagtgactgattcgggatccatctcacctgtttcagtgaccgccgcggaatctgtccgatcttctgcgagggcctttgcggactctttcccaccttctgccgcggctgccacggactctttctcattttctgctgcggcttccacagactctttttcatcttctgctgcggccttttctcttttttgtacatctgccccactgtctttcttcacgattgcctcctgggtgctttttacattttctcccatggttccccggggctctttgcctgacttcaccccctgataaacaccagtgcccagcaccgtcaccagaagaatagctgccacggcccatccagcccaacggtaccaggatggccgtttggtttctttctttcggctgtccgaaagcttctttattatattctccggctccagagaggaaggcacttcctcattctgcgcagctttcttgatcttatccaataattccctgtcgtccatagcctgctcctttctgctacttaagcgattctctcattttacccagagctctgctgatcttggagcgcacggtattgtcattcatccgcagaagtcttccgatctcccggctgttatacccgccccacaccttcatggccaccagaaggcgctcctcctgggccagctttccaaaggctgtgcgcacctggacattctcctccatggaggttccatgtccctccagctcctggggaagttctattgtcttattcacatattccttcagcttccgtttgcatttgttggacagaattttaaaaatccacgcccggaaagcttctctgcaccgcaggcttgagatggagctgtaggcatctgctaccgcctcccccacaacatcctctgcatcctgcacatttcccagggtatacagggcaaaccgatacatgtcctcatatacattttcatacagcttggcaaagacttccggtttctttaagtcctccatcccctcacctctccttctcctgtttcggaggaatctgccggcatttcatatcctcatctatacagtgtcattttatcataaaagtgttgcaccttgtgtgcatcctccgaaaggtttttataacaccccaggggttttattgcatagaaaaattctccaaacttttctatgcaacaaagcggacaagcccgcttcaactccccatcccctcactcatgaggggcttggtagctttgtgcgccaatgtgcagctgcgaagcagctttccctggcacattgtgtgcatcccccggagggtttttatgacataggaaagttctaagaactttcctatgtcataaaaatagagcgggaaatttaccattcccgctcttccacatagcagtctgccagcagattactaaagatctgtgctccttccacattcaaatgctttttatcagagaatttatcgtcctccagaatttcatggatctgaggatacttcataaagttatacagagggacaccacattcctgggctgcctctacgtagaattcatccatgatatcaatatcccctaatttttctgcataacctgcagtggtgggagggatcaccagattcagctcaattccattatccttgcagtactgtgcaatgtcatacagcacctgcttgttttctgtgtgcagagcctccggcttccagtactcacggcttacaagacgcagatcgccattatataccttgtccgcctcctgccatcccctgtacccatatcggtaataataattaggggcgatgttttccttaaaccggttgctggttttatattgtacgtttgtcttcatggccttaagattaagcacattgtccacccgtgttggataaaagaaaaactgcatccactcatcataggaagcatccttaaaaatatactccagctttacactcaggttggtcatccggtctgcaattcccaggcgtgcatccacattgctgtcgcaggcctgcatcatagatgcaactcccacccccagaaagactcttttcacaggatttttcttgcatacatccttaagcatatagtagcttcctgtgaggggctggttaggcgttgccacattaaaagaggttcctcccagtttctcatcgatcaccttgggattcactcctatatacataagggaagtgcccaaaagtacggtgtcaatgctgccctccattgctttcaggtctctttttgcataaatactgctgttgatcttggattccaacaagaatctggagccctggttcaaaagcacaagaaaaacaaggacaacacagactcggactgcgattttcctaatactgcgcatattcaaaacctcctgccattcctgtgtcaaacattcccatacccagcacacatgtgagtagaagcagatacacggcccaccgcagtaccaagggcctgcgggccagaagatcccgcacctgttcttttctctggatcaagcttactgccaggaacaacaccaggcccagggcgatatagaccactgtgtaccactccagcccaggaaacaaagcctcccaggatgtctggggatggaactgggtgaggattcgtttaataatccgaagggaccctgccgtgtccgccggggcgggaaataccttcaatagacttacaaggaagaaggtacgcacaatctgaaaaaatttccaccagggagcattctccggaatatgcagctttttcttcaaccactggaactggggttccaaaataatggaggaaataatgatcactccattggcaacaccccacaggatataccgccagcttgcatcatgccaggcacctgtgcagaaccataccacaaacagagccattactgcaggaaaaagcttccggatcctgggtgtacaaaattttgcaccaaattttccaaaattcaccgctgccttagacacagacacgggataaaagacatagtcccgaaaccagctgctcaaagaaatatgccagcgtctccaatactcagacaaagaggtggagaaaaatggcatatgaaagttttccatcacgtggattccatagatctcggccataccagccaccagatccatatatcctgaaaagtccgcataaatatacagggtgaaataaatacatcccagcaccagtgtaaagccgctcatttgactatagttggtaaaaatctgagttgtcatgggccggatctggtcagcgatcacggctttcttaaaaattccccacagcattctctgacagccatatgaaaaattgtgataggaaaaggaatttccccgaaagagctgaggcgccagatcctgaaatctgccgatgggtccctgggtcatttgagggaaaaaggtaacaaacagaagcattttaaatgggtttttctcagcttttgtttttcccttatatacatccagcacatacccgatggcctggagggtataataagacatccccagaggggccgcccattttaaaaactgcagattttcaatatgtaacagattcagcacccggttgatgttcagtatcaggaaatcgcagtattttaaggcaattaagattcccaggtttgccacgatcaccagggctgcatagcgcttctttctctgctttaccaggttctttttttcttttttctccttgcccttatagcctttctgagcaagctcctccttccagtcctgatcaatctgctcaatcttacaggccgccaggtagatgagtacggttgtcaccagcacatagacaaaattcctggttcccatgagataataggcagtaagactgactaccagaagggtcacccaccgaaatctctccctggtgaggtaatacaccggcaccgtcaggaagaaaaacaaaagaaaagccagggaattgaccgtcatttaatcgtcctcttgaagcctcttgatcagcttcagcatggcatctacagaattaaagttctctgcgtcaatatcatcaaaggaaatttcaatatcaaaggtatcattcagctctccgatgagggaaaccatatcaaaggaatccaggatcccctcctccacaagatgagcttccttctcaaaatccacttccggtctcagaccttttaaaatttccattaattcttctctcataacttctctccttccgcttctgccttccggcattttcgcagctttattatttttctcatttcttctatataaatagagtctccctccatccatatctttctcttgggactttcatcctctccgtttaaaatcacataggagccgcaggtataccagctgtccagatatcccacctggatgggaggaaacacctttagacctccataattcattgctcttaaaaaccggctgatcttctcaaaatcccagcccagatccaggatcccccctgcgggaacctccttagataaatgaaacgatggctccagatccaaaggctgtatataagtgatatccccctccagaagacggggcagcaattccacaaagccttcataggctgtcttcatctgttcccggaaaagtgaaagggaggtggtctcctgggtaatgggaatttccttctgccacaaatattctccctggtccacttcctctgtcatcctgtgccaggtaatgccagaacagggatccccctggaagactgcccaagcctctgcattcctgcccatattccggggcagcagggcctgatgacagtttaccgggaagatattgggcttctccagaatatctccggggatcagccatgggttaataatgctgaaaagcaaagtcttttccttgctatcacgaagaagaccaaaaacctctgccttctcctttttctcatagttcaggccgcagaactctgcacgcatgcgggcagaggactggctgccctgtgcactgtccaggcccagatatgggattttctgtctgtgtacttcctccagacagtccagaaaaagagtcccagaacccagcacaatgattctttcaaacacttccttcacccttatttttcctcttccatataatttttcttaagataggttctgtcaatcttggcatttttatttaaaggaatttcttccatataaatatatttgttgggacacatatatttcggaaggtatctctgtagatccacgatcagcttggtggtacactcttcctgggcctgatagaaaagaacgattttttctttcctgtcatcatacatacagcagcaccgctgtacataggccagaccgtccagaactgcttcaatctcacccagctcgatccggtgtcccatatgcttgatctgatagtcctttctggacttaaagaacagctcccccttttcgttatacattcccaaatctccggtacggtagatcagctccggataagcagtgtttctgggatcctggcagaaggcggcctgggtggcctggggatttctgaaatagcccagggccagggaagtcccccgcacacagatttctcccaattctcccacagcgggggtttggttgtccttatccagaaggaatacctctgagttggcaaagggcaccccgatgggaagaagctctccctcccggaattctcggtccaccacataataggtacagttgcaggtgatctccgtgggaccgtataaattcacatacatggcatggggcagacgagccctccagtaattcagcaccttgatgggcatcacttctccggagaacatgattttttttaaggtgtgaggcacactcttgtccagccccttaaaaatagacaccaccgccatggcggaaactgcccatatgatcgtagtcacccccttctcctccagaaagcccagaagcttcttaggcatggagaagtagctctgaggaataatatgcatggatgcaccatttctcatggttgaataaatatccttcactgacacgtcaaaatcaaagggggcctggttggcaaaaacctcgtcctcatgaaacccaaagctctctgcaaaccgctccgccagatcaatgaccgaacgatggcagatcaaaactcctttgggcactcctgtggagccagaggtgtagatggcatacagaggattggtatccagatgatctctgcggatctcataaagtacctggtccctcaccggtgcatttaccagctcttcatagacacacacctgtcctttataggcagcctgctccagaatctggacatcctcttttaggcacaccaccttcttgggctggacggtatttaaaatcatgccgatccgctccaaaggaaggcggatatccacaggcacatagaaattgccgctgtgaacgatccccataaaggcagccaggctctccacattgcgccggatgagaacggcaatggggcagcggacaaacccgggctgggccagagcacttccgatattcctgctgatcctcagaaagtccttataggtaatttccttctcctcatctgaaaacagaatcttatccggaaatctgcctgcccctctctccagatattctaacacatttgtttccattgtttctctcctttaggccggatcctctcatagaagcgcttctctatgtccttctccggcttattatattgttgggtatcctcccaaagcagtctctgggcttcctttaaagaaagattcttcaaacggacctccacggccagctccccagtacgcacgggataccctctcttttccaggctgaaatactctgccatggggtgtgcccaacagtctgcatggggcaccttggcctttggccggatccagcccagctccctctccagaagctctattttctcttgatctgtcacgtcatggtaagcaaaataagacagcgatgtcacctggacatctttcagataatccactttgcccagggaatccagcttttgggcaagagggccaaacatctggtactcaaagtccagcaggttcctggaaatctcaaagggttcgattccttttgtgtgcgtagcggactgaagaatctgccccttcgtcctgccgttaacagccaaaggaatattgtactgttttgccagcaggtgactgtagtaatgcataaaatgaaagcatacggcacagaaattcttcattatctttacgcatacctgatagagctttctaagctcattctcattcatgcggatggaaacatgatccacatccagcttgtccagggcaatctccaggtttcgttttccgaactccgtggaaaatccgttgtcaaaggtgaaggtgagtaccctcatattataaaactttttcagcacatatacaacatacatgctgtctttccctccactaattcccacaatgcagtcgtatttgctccctgactgccttgcctgatccttggccttctcaacttcctcccggaaaattgcttcccttttttcacaatcctcccagatatccttagcagagtgatggaaatgacagtaattacattccccttcttcattaaaccgtattcccgggtaattcatgggtaatccacacgtaatacatttcttcataataaaatctccccttatttcttcaagcaacattttcctgcaataggttctttatatcccagccaggtgtaatctttgtgaaatattgcgagattttatcattttgattacttttttataaaaatcgtaaaaagaacaccgtcctcttgattctctgccctcactcctccatgatgggcacaggccacttcctttacaatggacaggccgatgccacagcttgtgcgctccctgcttctggccttgtccaccttgtagaacacatcccagatcttatccagctcctcctgggggatatggctttttgtattaaatacactgaagcaatggtactcctggtcttcgtaaaaattcaggtggatgtcccctttttccttactgtgctgaactgcattttttatataattgtatacggccctgcatatcattctgtaatccccatgaattggagtgacaatggaattttcctctgtatagcgaagacccaggctgccaaaatcactggcaaagcatccgcggagctcctccataagcttttctgctgaaaattccgtcagggtcagcacattctcacccttttcgtaggcggacagctccagcatctcctggatcatccggttcatccgggagcattcctctgtgatgacagtcccatacttttccagcttttccggctgtctctgtgccacataagtaagattttccacataccccatgatgaccgtaatgggcgttttcagctcatgggccatattgcgcaccagattcttccggaactggatcccctcctgaagttcctttaagtttttctccagctgggcggacatggtgttgatggactctgccagagtacccaattcatcctgggaagttacctccaaagactcctcaaaattcatctgggcgatcttctttgtgaccttgttcattttttccaaaggctccacagtctttctggcccagacagataccaggagtacacacaacacaagggtcaccaggccggagatcatataaaacatattcactgcgctgatgtcatcgttcagccctaccagggactttcggatggtgacataacccactccttccaccttatccatttggatcaaataaggatttttcccagtgctgtcgtagattcctccaataaaacagcttcccttttcttccagctcctcatgggagcttttcagggcatccaggacaatttgagaaagatctttacttctattttccctgaaatttgtggaagccatcagctcgtaattctcgtccacgatcccaatgcgtatattgtaatttccagccagctcctcaatactctcctgaagcttttcattatcctcatggatgtgtgcgatcacctttttggccagggcggccattttcttttggttgcgctggatcacaaagggctccttaaacaccgtattcaggaaaatggaaaacaacagaaaccccagcaccaggatgcaccctgccaaacggtattttctccttaatgactgcttcattcctctctcctcctgcccttgggggctttatccggctgcgccgcacacagggaaccaaaacttaatccatactcagggtataccccatgcctctggccgtcttgatatattcaccgcagggccccaagtccatccgcagcattttaatatgggtgtcaatggtacggctctctccttcgtagtcaaagccccatattttctccaggatcatactcctggtaagaacgatcccctgattatgcattaagtacagaagaagctggtattccttgttggtgagggacacctccttgccttttacaaatacccggcagccagcctcatccaaagtcaggtctcccagggtgagaaccttcctcttcttgttcctgctgtgctccagagccttctcaatcctggccatgagcacatcgggatgaaagggcttggtaatatagtcaaaggctccctggcgaagaccctccacctcactttcatgatctcccagcgcagtgagcaaaagtacgggaatatcggatttctcgtgaattctccgaagcacctccatgccggacagtcccggcatcatcacatctagaaggatcaagtccaaatccggcatataccggaaatactggagagcctgctgcccgtcctccgcctccacgatctcatactccttctgtacaaaaatatccttgagcagatcccgaagcagatagtcatcatctgcgattaatatcttcgtacccatatctattccttcccggcctctgggtcatttcaatttgtcctgaagcctgcatgatgaaaatgatcataaaattttatatggtctacatttatataatgtaataggtttaccttttattgcagaaaataaaaaacttttcacgaatgttggcagaactttgctaatgtaacaaaaaaggacacggactgccttttcacagccaatgtcccttctgcctcaatccttcgtggaaatatccagtctttttcgtgctgctggtgactcgtgcaagaaaacctgctcttacagcttctcaaggaaccgcataaatgcggctcttccttcttctgtgcatttaaacacaccagcgcactccagcacctttgtaaaggtaacaccaatttccttctgaaggatctcttccacattctcagcggtgatccgggaatatttcggaagaaattctgctgcccaccgggcgtgcttttcaattccttcattggaggcaatgtctctgccctccagtatgtactccttgagaagctccatctcgtccttcagacgggcagggagcacggccagtcccataacctcgatgaggccgatgttttccttcttaatgttgtgatactgggcatgtggatggtatacccccaggggatgctcttctgtggtgatattattacgcagggccagatccagctcaaaggtgtcctccacttttctggcgatgggggtgatggtgttgtggggctctccctgtgtctctgcgaaaataaaggcttcctcatctgtgtaacctctccacacctgaagtacatgatctgccagatcaatgagacgcttctcatcccggctgcggatcctgagaacggacaggggccatttcacgatccctgcttctacatcctggtaccctggaatggtcacatgcttttcaatgggcgccttggccatggcaaaggtgtagtgccctccctggaaatggtcatggctgagaatggagccgcccacaatgggaaggtccgcattggagcccaggaaataatgagggaacagcttcacaaaatcaaacagcttcacaaaggtgttccgctcaattttcattggtgtatgcaggctgttaaatacaatacagtgttcattgtaatatacatagggagaatactgaaaaccccaagggctgtcatttacagtgatgggaatgatcctgtggttttccctggccggatggttggtccgtcccgcatagccctcattttcagcacacaggaggcatttgggatagctgctggctttggccagcttggctgccgcaatggccttgggatccttctccggcttggacagattgatggtaatatcaatctctccgtactggctgtctactttccattttttgtccttgctcacacggtaacggcggatgtagtcactgtcctggctgaacttgtagaagaagtctgtggcctcctggggagaagacgcatacttgtcccagaactccttctgcacctgggcaggccggggcaaaagacagttcatcagtctggtgtcaaacagatctctgtacacaatgctgtcagggataagctcccgcttcactgcctcctggagcagctctgccagaacctcctctaagtttatgtgggagtactcctggtccggctccacatattcatcttccttaaaaacatccagaagcaggttgatggtatagctcttctcacactgcggagtcagccctgtctcaattccatactgcactaactttttaatactttcacttaacataaaaagcgcctccctactttaatttttctatgtatgtgacaaacacattgccgttctttgtgaacaaagcctcgctgtcatccatagcatacgcactggtttctttcttctgaggatcgtacagccaggtattgtaggcatcgtatcccacgatcacccgggtctggtctgctcctgtcttcacgatcactggtctttgggcacttacctgataaagcacagattccagactgcagcctgtgaggtccaggaccgtgcccatgtctccgatggcttcctgaagctggttcacatctaaaatcccttccaggaatttttccgggatatcctcttcattgagctggatctgggtcttctggtttcctctctcccatacatactgctgggctctgttcagtaccactcctgtaagggcgtctgcctggaggatggcctgtgccggatccagataaacgccgtccaggctgcccctgccatacacataatacagctcttcctggggaactaccgtgtccagagccacctccttgctgtctgtgaatctggttttggcggacaccaaaagaggcgtctgctcctccaaatcctcctcaaaggcaaggcggatctctgttcccttgcgggcatcactggtgatctcaatgctcatctgttttgcaacagccttgcggttattcataatgttgtccttcttcaccggagaatagccgctgccgtttctctggctgagctgcatctccatcatggcaggaccgatggacacctctgtgacgaacaatccctgaggctcatagctttttttcacattgccctggaaatcttcaatccggacaatactcatggccacaatctcatttcctctggcatctgtcaaaatattttcctgggccgagatcccatagaccatgtcctcattaaaaaagcccagcaccttcagctgctgtccctgagagggagccagcaccctggtctccttagtatcaaaatcaatttccttgatctgtatgcttccgtcttctgcctgaatcatccaggccgcatgggcgttggtgtcagacacagagaattcctcctgggagataccgctctccagcacctcataggtctgctggtcaatattcacctggtatagatttcccgcaagaagcagaaacagctcatttttttggtttacataagacaaaattcccagatcctgcttcaggaactggaaggactctgtactggggataaacaccttctcctccaccacattctgatcgttgttgtaatggcacacactgactcctgcgtacccctcatgaggcccccggttcatataaccatagagaacaaaatccacatccccgttttcatccacccggacgatcttcatgtcgtgctggttcctggagtcccggaaatctccgtttttatccatacggaagctgaaaatcttaatgagcttgtcagattccggagaataggaccacaggtctccttcctggacaaaggctgccactgtagtatcctggtcggtgagataattcacctccttgtctctcacacccagtactatcccatccggggtgatggtggaaggatccccgtcatagacctgtctggcgctgcgctcaaagcccagaaggctgacggttccattctgataccgcatccggtaaaaatccgtcacatcgtaaagctcggtcctgccttcctcgttctgggcagtgatctgatagtccagggaaatacttcccgtggtctcattaatgtccttgatggtgggaatggctgtgcggtagatctgaggattcaaatctccccagctcaccatatcccaggaagaagtgatggacaccttggaaaaattctcatccgtattggcattgtctgtttccaaatagttcaccagggattctgccaaagccttatccacacatctctcatagaaatccctggcaaagctcacataatctcctgcgttcacattggagcgctggatcaccctggtataataataataggtctcctcactggtctgaacagagatctgaagggaatactcctgattcatcagcatggagctttcaatctgggccgaacacttcaggtatccgttcacatccgtgagattcttaagctttttattttcaatgaccttgcttccgtcagaggtacggatctcataggacatgctttgtacctgtgcagaataagggttgataataaaattcaaggttttgctcgtatccagcggtgtcaggctgtccctgctgaagtccgcctgcatcttctgtttatacccatacatgcggtttaccataatgtcatccacattcatcataacctcaggcagggtgcagggatttaaatctgaccggtcatccgtcttctcactgttgagcaaaacagcagttcctgccacccctgctgcaaacaccagaaacagaacacagaatttaagaagaaacttctttaccttcatctgtgcccacctccctcatccaaaaggtgtttcagggtgggattcacatgaagctgggaaaggagtctgtccaaagcaggatcctgctggttttttcctgtcttcacagcacggatcagaaggtttttcggggtatgctccatatcaataaattccaggatctgggtctcatatcctctgctctccaaaagtctggcccgcacaccatctgtgacaagggctgccattctctccttcaaaatcccataggacaatactggtgagagcagctcattctccatctgcccgtttaactcatgctggcagcagggcacagacaagatcacctgggccccccactggactgccttggccagagcatagtccgtggctgtatcgcaggcatggagagtcaccaccatatccacctggctcaccccttcatagtccgcaatgtctccctgataaaagtgaagcttctcataatgatagttttctgccagctctgtgcagcggcggatcacatcctcctttagatccaggccgataatgtttacatcatagcctttaagctccttgagataatagtacatggcaaaggtgagataagatttgccgcacccaaagtccaggatgaccacctcacggtctttgggaagtctgggcagaatgtcctcgataaattccagaaaacggtttatctgcctgaacttatcatactttttagccaggatctttccctgggcattctgcacccccagatccaccagaaagggaaccaggatcccctcctgaagaatatagtttttctggcggttgtggctcaaaggctgcttctcctttgtacagggatgttctttggtcttcatggtcacctttcctttcttgcttaccaaaaccattccatcccggcatacgccctgaaactgaagctgcataaaattgtcctgcatctgctgttcaatataagaaactgcttcctccttctcatagttggtgtgcaggacctgtgcccctacagttacagtggcctgataagaaagactgtccctaagaaggacgggacgaatcttcactttggaaggtccgccgcctgatttctgtttgctgagtgtcatctggatcaactggtcatttatgtgattttccaaatattctcttaaagttttttcattcatcatggttctattataaagggtttaattctcattgtacatagggtttttttcaataatacctgcggcatctgtgtctgcggcaccttctcctggaaatctcctgatagagaagcacctgcaccagctcatccagaaaactgcccggaacaccctgggcctgcatatccggctccatggatcttttaatattctccgccaggtgatgaagcaggaaacggtccggatactcatcataaatactgctgccttcgtagtccagcctgtcacattcctcctccaccttatcctgtatttttctggacatctgcggataataagattttattaatgcaaattccttctcctgtacctgctcgccctcatagagaaaggggttggaataggcagtataaaaggggaaaaatctatcataatacataaaaaactctgtactcctcttccaaaatgttctattataatgtatgacgtttttccaggcacgtgtttgtccccggaaaaatttttcaaatataaagtcatagaatgcagataagatacatagaaaggaagtttatgaacacagcagcagatttaagaaatcttctaaataccataaaccggaaaagttatccggcctacaaaactcttcagggagcctacaccttcccggactatgttctgtccgtggaccacgtacagggagaccccttcgcctccccctcttccctgagccttcgcatctcccacaaaaaagctggcttcccaccagaataccgaaaggataagatcacccgtactgccctgggtgactatctgatccgccagtttgcaaaacaggtgaaccggtacagctttcaggcaaagggctctggcaaaagcggcctgatctccatcagccgctgcggtcaggaggttctgtcccgaaccgccttaaagatcacggaccaggagcttcttgtgcggtttcatgtgggctttcccgccaatggccggaccatcaacgccacagagctggagaagatcctgttccaatatctcccggaggctgtaaaaaaatccttcctctactccagccttcccgccgcctctgtgaaagaggccgtgtatctggcagaagaccaggaggctgtgcgcagagaattaaaaagccgggggcttgtggccttcgtggcggacggctccatcctgcccaggcagagcggcatttcccagcttcccatgaaaaacagcattcccttctcctcaccggattctctgcgggtgaccctcacccttccccaccatggaaccatcactggcatggggctgcccaaggggatcacccttattgtaggcggagggtatcacggcaaatccacccttctgaatgcccttcagcttggggtatatgatcacatttccggggacggacgagagtatgtgatcaccgatgacacagccatgaagctgcgttctgaggacggacgctttatcaaggatgtggacatttcccttttcataaacgaccttccggacagaagagacaccacctccttttccacccaggacgccagtgggagcacctctcaggctgctgggatcgtggagggaatggaggcaggcagcaaggtatttcttctggatgaggatacctctgccaccaactttatggtgcgggacgccttcatgcagaaggtaatttccagggaaaaggaacccatcaccccctttgtggaaagagcacgccagctctatgaccaggcaggcatctccactatcttagtggcgggcagctccggcgccttcttccacattgcagacacggttcttcagatggactgctaccacaccatagacattaccagtcaggtgaaaaatctgtgtgcagactaccctctcctggcctcccacactccgcccttctccatgcccggttcggaccgtcccttctatgtgtccgtcccggacaggccctccagagatcatggcgcccccaacagaaatgccatgaagacaaaggtccggggaaaggatgaattcaccctggggcgggatgccattgacctgcgctatgtagagcagatcgtggactgcgaacagacagccgccctggctctgatcctgcgctacggcattgaacattttgcagatggaaaacgcagccttccccagattatcacccttttgtggaaacagcttgaggcagagggcctggatttcctctatggcaattcttacgtgccctgtggctgcgccatgcccagacttcaggaagtctattcctgctttaaccggttccgccgctgatcttccgaaaaaaggataaagaaatccaagggcgcaagaaagggagctgcacagtggtgtacagtctccctttcttgcggttcttttgattctacgtttctgtagctctctggtgacatcagcggtaaatcaccaggccttccatggtgtttttcatatctaccaggaaataaagctgctcctctatggagtaaattcctttttccttccagatttcccgattttctccctcatggggattcaaaataagatcctgggaactggtgtcaatgatgtagggcggtttggaaagtatcactcccaaatagtacttgttccactttaggatcagaatcacagggaccttgtggggaatctggcctttatcccagatcacagggataatattgcccttatgattgatcaccccatagaaattcccagtgagacagggaaattgggatatttttatgtctgtactgatctcctccacatagtcatactctatggcataatttttctcttcaaaggaaatacacagcatttccttattctgccccaacgccatattttccctccttcagataccggctgataagaatctctatgtccacagcagcacagatccttccgtttcccattatactgcagccattgatcccggtgcagcgccggaactccggcccgaacagggcaggaagcggcttgatcacaatacgtttctgttcatacatagcgtccacgatcagacagccttctcgctccattccatggacatacaccatgatggccgactggggtatctctccctctattctgtaaaagctcctcatatccacaaggggcaccatcttatcatccagcagcagataggtttttccatttatagtactgatgagatccttattgtctttatactccagaaatcgaaatacatacctggcaggcagagaaaagcggcattttcccacacgaaagcggatacattccatggtggcaagattcaggggaactgccactgtgaaggtactcccctttccgggaacactgctgatatacaggtggcctcctgcattttccagaacatttttcacaacatccagacctacacctctgccggaatattccgtcacctggtcattggtggtaaatccgggctggagcaccagctcccagatatcctcttccccgtattcttcatagtcctttgtgagaaggccccgctccttggctctttgaaggatcttcttctcatccagaccctggccgtcatctgcaatagacaccaccagctcccccacggtgcttgtcactgtgaattctatttttcccttccggctctttcctgcatgcatacgatcctggggagactcgatcccatggtccaccgcatttctgagaatgtgcatcaagatttccgatacataatctaccacacttttgtcagcctcgatatcggagcagttgatgacaaaatctgcttccttgccctggtcccggcagatatcccgcagaattctccgcagctttgggatcatccggctcacaggaaccattctggactccatcaccgtgcgttctacctcactgatgagcctgctgatctgatgagcggttccctccttcacctcagtgagtccatgctcctccagctggtcctccaggatcagcatctgtatagtcagctcggcggcggcgttttgaagcttatccaggcggtccaggcgcacctccagatactcggtctctttattttcagaaccgcctttgtcctcctggacggcctcttccctggcaggctttggactgctgtccgccaccacctggcaggaaaccacaaaaaggcccttttccaacagctccaggaccttctttttatcctgggtgacaaaccggaaataagttccgttttctgcaatataacctgcgctctcctggcttttctcaagatcctggggaaagctctccacctctgtacaaaaaggagtgatctggcgcaggagcataaaggcacggatattctccattctgcatccaggttcgaacgttactctggctatagtccccgccttgcctaaaagctgtatggggatcatgggagcagtatcctccgtctgctgcccttcctctggctgattctcccggtcctctgcgtcaatggctgttttcagatattcctccacctgtccctgaagctcaccagaatccccgggacagtaatcctccctggtcatacgctccagctctgcctctatataatccaagaaggcaaacaacagatcaaaaagctctgcaccgggatcctgaatcttcccatactggtcccggtaataggcaaacagatcttccatcttatgagccatggaggacagatcattgagtcccatcatggcagaagagcttttaatggtgtgcatgacccggaaaatattgttgatatcctccggtgtaaaggcattttctttttctgcctccagcagtaccccgctgagctgcccggtaagctgctttgtctccagcagataaacctccagcatctccttagcatctgaatcaaaatatcccatggtcttctccgtttactccgctccttcgtaccatacactgcggtttttgccgctgcgttttccctggtaaagggccttgtccgcgcgatttatattttcttcaatcccctcttcttcctggtagaccttaagtccaagggtaagggtacagttgaatcccacgtcattgctgtaaaacttaaatgcttccacttcttttcgtatctgttcactgatggcaaaggcctcctccgggctcacgtccataaggaccagaagaaattcctcaccgccccagcgtaccaccttgttgccttgacaggcattttccataatattggacacacataccagtaccatatctcccacatcatggccgtaggtgtcattcaccttcttaaaatcatcaatatctgccaggatcagcacattctttgtgctttggtccatgtggcggtgaatgtcatccagcagatcccccaccacatatctgcggttgtacaaaccggtaagtccgtccctgaaagccatataattcagcttctccatacttgtgcgcagctcccggttctgtctgttcagctcatccttctgcttctttaactgaagatgggtctgaacccgaaaatgaagctcatcctttacaaatggcttcttaatatagtcacaggcccccatggaaaaacccttgaccacatcttcatccttatcctttgaggtgaggaacaggatcactgcatcatttctgtcctgttctttcagttttccaaataactcatagccattggtatccggcagcaccacgtccagcaggatcaggtccggctgatactggccgatcatatccagggcttcctgaccgctgtgggcctcacacaagagatagggatcttccttgagggctgacttgatctgctgacagataagaaggctgtcatccaccaccatgactatctgtttatttcttatatccatttcgttcctccgctatttacaatacttttttcgcatgtctgactgtgctgacctccagcctgccatcatcaccataaaacaaaagcgtccttccgtaatccttgcctgtatcttccccaagaatttttattccttcttttttaagagctgccttcacagcctgtacgtttctttctccaatctcccaattgctgctctgggtggcaaacatcctggcgcctccggctatttttgccgtgagcctgtacttatccgccccctgctttttcatttcctgaatcaatgccaggactccgtctttggcaaatttgtaggcattcccctgttcccggatccccgttttgtccggcagaacaatatgggccatccctgcaattttcttctgtctgtcatataagcagacacccacacaggatcccagcgcataggaaattaaatactggccctccagggcagtcttcccctcagcaattcccacaataatcttctccatattcctactcctcaagcttctgaagcattccatgaagagcttccagctccggcaaaaataggatccttcccatgtatgagcactggtccagacggaatctattttcaatcactaaaatatcctcgctgactctcaaaaaatgggagagggcagagcttaagatcgcccctcccatgtcgatgcttaaattgggcacagacacatcaatctccagattcataagctgggacagggcacggatataggagccgcacataatgttgcccaattcattgatcaaagaagtttccatatcatctaattttaaaaggtcccgctcctgctctcccagaatggtattcagaaccatgtctgtaaacacctcatccatgagaaacagaaacattccgttcacttcaccgaaaatctcaaccatgatccctgtctgaagtgcttctgcctctgacaaaatggaataaatctcctggtaggtcactacctgaagatccggcacctcaatctccaccggcaggttcatcatctgggacagagatgtcaccgcatttccagaaccaatatttccaagctccttcagaatatctcctgaaagctcctttaactgcatataacttttcatcttcccacctctttattgctacacttcaaactgatccaccaattccttcaatatctgtgcctgggcggacagctcttcgctggctgcggcgctttcctctgaagttgctgagtttccctgtacgatctctgagatcagctctacactctttcgtatctgtgtgatggcatctgcctgctgcacagataattctgaaatcttatctaccatctttgtcacattttgggcccctgtcacagaatccttcagggtttcggcagtggactgcacagcgcccattccctttgtgaccgctcttgtatttttctcaatgagctctgctgtaagcttggaggcgtctgtggtctttgacgcaagcctgcgcacctcagttgccaccacggaaaagcctctgcccgcctcccctgctctggctgcctccacagccgcattcaaagccaggatgttggtctggaaagcaatgtcctcaatctcctttacaatgcctgtgatctcactggaattcttctgtacagacttcatatactccataagctcctgcatctgtttgttacagttaataagctggtttcccaccgtatctgcaaccttgctggagttcacggaattgtctgcgttggcctttacactgtctgcgatctcattgatactcactgccagctcttcgatggatcctgcctgttcagaggtcccctgggccagcgcctgggcgccgtttgacacctgctcggctcccccaaatacctgctcggcgctgctgctgatctgctggattgaatttctcaacagactcccgatctcatcaatagcctcccccagagctttgaagtctcccttgaaatccatcgttgtcttatagttcagcttgccgtttcccagagcccgcatgctcttctcaatctccttcacataggagttcagggcattggaggtactgcggatatcgtctgccagctggcccagctcgttctgggaggaataggccagattaagggtgagctgtccgtttgccatatcattggacgcttccttcacctcattgataggccggacaatgcttctggtaataatgagccacaaaactgccgtaagaaaaatacatacaaccgccacaagaatgagcagactgatcacacttttgctcatctccatgcgttctatcatactctcatcagcatcctggatggccgcatcggaaacttcactgagaatctcccgaacattatcagacatgggaagatattcattggtgtatatctgcaatgcttcctctgacttgtcgtcacttaggtattccagaactctgtccctggaatcctttagcttcggaaattcttcgctgagccggtccatactctccccgccgctttgataaccgctgctgagtaactcataggctgtctccacatctttgatgatctcctgggttgctgtaaggtacttggatttatccacgagactatccgccactgccataagcgtgatatttcttcctacggtctgtaattctcctgacatggtcaaactggcctggacattggaaaatggttcctcgtaaagctttttcattctgtcagaaagatcattgatgctgagcagcgcgatcaccaccgtacctatgtaaaaaataagcacaatggcaaaagacaatatgatttttcttccgatttttatattttcaaaatatttagtcataccctgtcctcttcccatatataagccatcactgcatatggctcatgattattttctgaaattcctggtttttaaaaggctttacaataaaatctgccgcccccatcaccaaagccttctgaatcatcatttcctgacccaccgcagaacacatgatcaccttctggccaggattttctgtgagtatctcttctaaaacctccaagccggattttcccggcatggtaatatccaggagcaccagatccggcttttcttccttaaacctgagcagggcctctgttccgtcctgggcctcacagatatccgtaaatccacattcccccaaaatctttcggatgacctttctcatgaacatcgcatcgtctacaatcaaaatctttcccatcatatcctttcctttctccgttaacctttcttttccactgctttcttataaactgcagcataaattgtttccagccgggtttcctctctggacagaagctccgcatggccggtaaacaaatatcctccgggatttaaactggcctccagccttttcacaagaaccttcctggattccttgtcaaagtaaatcatcacgttcctgcagaaaattaagtcaaatttttcattgactctgttctctgccattaagtttctctgcttaaatgttatattgtatttcagactgtcatctatccggaaatgatgggtgtctatggcacggcagtaatttttctgccactgcacaggaattctctccatggccttcatgggatagacgcctttttccgcctgctccagggcctcctggctgatatccgtccccaggatcttcaccgcgggcatcacctctgtgttccgcttcaggtcctgaagcaccatggcaagggtgtaacactcctcccctgtggcacagcctgcacaccaaatctgaataacccccttgctgcggttttcaaataattcaggaaataccttttcctttaaaattgtaaaatgaaccggttcccgataaaaataggtataattggtggtgagccgattcaccatctcccctgcatactttcctgtgctgtcaccctccatgagccggatatattgagaaaaggaagggatcccatacttttccaaaacctttgtcatcctgcactcgatcagcacccgtttattgctcaggttgattccatagttcctgtgcatataactcacaatctccgaaaattccacatcacttaacctaatcacagaccttttcccacacccccgacacaatttgtttcataacgcttaaatcttcctggacctctccctgggcttggtcagccaggattccaatcagtcttccctccggatttctcaggatcaccccacagtcaccccgcacacacgctgccgccgcgtaataaacgaccagctcttctgcgtaccaggaaatacccaatatactgtccaaagcccccggtacccgttgaatcgctggtctcataactactgcctcaagcagctctttttctatatataaaattttatgcttcacttttactgtaataaataccatactcttcccaacctggcttttgtgcccctcatatgccggctgccgcctcgtataaaaattccggactcaaaagataggccgccacctctccctcttcctggattttcataggtacggctgccaaaagatatctgttgttttcattgatcaccggttcatccaaaaggacaatccgttcctgtgggatttcctgaatacccaatacatgctccaccacaacccccagcttctctccctggtattccaatacgatcatatacctgtacgggacatccacacaggatcctccagctaaaagttcaaaatccagaaccgtcagttcctcctgtgcctccctgtcatctgacacataccctacccaggaaagaggcaggagataataaagttcccgggacctgaagaccaaatataaatcctgaagctcttccatttctctgcaccgacccttactgtctcattactcctatcatacgctattttgacagaaaactcaagtataagacagcggaggttcctggtcttggggcatttataatttctccagtgcttccaccactttctcaaaatgcataaagtgggaggcctttactaaaatcgtatccccttcctgaacttcttgttccaatccttccataagctcttccaggctttccttatggaccaccaaaagagaggggttcttctccctggccgctgctgccattgcccttgacagaggccccacacagataagcttttccaggctgcaggtgcctgcgtaaaggcccacctcctcatggagcttctcctcctcttctcccagctcacccatgtccccaaggacagccaccctgcggccgcttccgtccttcagaacgtccaaagaggccttcatagacatgggattggcattgtaacagtcatccacaataaggaatttgtctgtgtcgatcatatgaaaacggccgctgatggcctccagactctcgatccctttctgtatctgggcagcattcagcccgtagatccggcccacggctgctgcggcaagggcattgtagatcatgtgccggcccggcataggaattttcaccgagataacctcctctcccatatggatggtacaggccatccccttcagccccagactctccacctgatctgcatacacatcccgttcaggagaaagcccaaaaaatatgggcttcctgccctgggattcctgtactgtgatcagcttgtcatcgtctccgttgaggacaatgtgtccgttctccttaacaaaatccagcatttctgtcttggccttaagcactccgtcccggtctcccagattctccagatggcaggtcccaatattggtgatcacacaggtatccggcctggccaccttggcaaggcggctcatctctccaaaatcactgatccccatctccagcactgcgatctcatcctcttcccgcagccggaaaacggtgaggggcaggcccagttcattgttaaagttcccctgggtttttaaggttctgtatttttcctttaatacagaggcgatcacttccttggtgctggtctttcccacactcccggtaattcccaccacagggattcccagctgttccagataaaattcagcgatatccttcactgcctgaagggaggattccaccagtatatagggaaagcaggcatcctccaacgtcctctcagagagcaccgccagggctcccttttctatgacctggggaatgaacacatgggcatccacccgctctcccacaatggggacaaaaagcccgccctgctccaccttacggctgtctgtggtaatggaggatacttctgtatataacgcatctgcaggaccgaaatagacacccctgcacacgttggtaagattctccaaagtcagattcttcatatttttctccattccgcccatgagtgggcttttcattattttaagaaagaaccctgttctgatggattctttgcctgttatgcgaaaaaagcctgaggatacctatcctcaggccttaattttaatattttttcaaggaaacttcaatgagtttttcgcacaaggtgggataatccattcccagtaccgccgcctcctggggaatcaggctggtgggcgtcattcccggcagggtattggcttccaggcagaagatctcctcatccttggtcataataaaatccagtctggcatagctctggagacgcagggcacggtagccttttactgcatagtcctgcatcctcttggtaagctcctgtgaaataggagccgggcaggtttcctttgtggcgccgggcttatatttattttcataatcgtagaatccctcctggggcacgatctccaccaccggataggcttccccatccaccacggccactgtatattccacacccttgatatactcctccaccacgatctcttcttcataggagaaagcgtcatccagggcttgctcatattccttctggttgtttacaatgtaaacgccaatgctggagcctccgcagcaagtcttcactaccacggggaattccatcatgatcatatccagattccggatgcaggtatcctttttcatggtgagtcctctgggtgtggggatccccgccataaggaacaactgcttggttatccctttgtccatggccatggcgctgcttaaatgccccgcccctgtatacttgatgcccatcaggtcaaagactgcctggaccttaccgtcctctccgtttgccccgtgaaggcccatgaacacaatatcagcttttttgcacagatctagtacattgggtccaaagaagtcctggcggctcctctccatctctttaatcttttcattaaagctgttgatataggccacagcttcatccacattgtattcctgagggaaaggattaacccagtccacctggtccagtccgcagaaaatatccaccaggactgcctgatgccccttctctctcagggccttgcagatcccggttccggaaacaatggaaactcctctctctgtgctggttccccccgctaatactataatcttcatattgactcgtctcctcctgcttttatgccattactgataaatcaccaccggatctccggtttcaatattctcgtagatgatctgggcctgttcaaaaggaacatcaattcccccgcaggacccgataatggtataaaggtcagctccaaactgtgtcctccaggtagcgtcatgaatgcccaaatctccgaagaagggaatgaagaagcttacgtttctcatctcatcctccagatataaaggagatttcttctctccaaccccgtagcagcccactggcgtgggactgttcaccgaatccccgcttacgataggggtatcggctgttaagtatccgtctttatataataccatacgctggctggtcaggtcaatttctacataagtatttcctactccgccggtttttctgtctcttccccgcttagagtatacgggctcccgcacttctatatccccattcataatattctctataagggcatctgtttccttttcctggtcaatgatccagccataggttccgccgctcaccgtgatctctctgccgtcataggtgacaaagggaatttcttcccctgcggtgttatatttcccggccagctctgccacataggccgccacctggccttcatcagggacaaaatccccctgctcgtcctctttcagccagtttacgatcacactgcggtccacccgctgggattctttgccgaaatcataggtgatgatggtgtccgtcagccttgtcacctgctccactgccttctgaagagagggatcactttccagtaccaaaggacggttatagcagccggcctcctccaggtttagtccctggtctcccaggcgggcagcacgctggatctcctccaggaatttgtcccggttcacttggtttcccagaacctcaggcaccaccacgatccggtcatcctccaccttccaggaagcatcggaaggcggggtcacattctccggctgcatacaccgcagggaatccacagatttttctaaagtctcctggtcaatttcaatgcaggcagagcgctctaggctccagtccttctggaaggcctgaaaccacagccatttttcctgttgatccagatatagctccagggtattgtcaggccgataactcaggccgatctcctgggcagtaagcttctctctgccgttgtccatctcatcaatggccagcacatacacctgtgcctgctcctggagtcttggactgatctcttctatggtcttaaaggagcagtccatcccattaatagaagttccgggcaaaaaatgcccggagaagaaatacacgccgcctgcatatgcagctgccgccaatgcaaacagcgtgacaataagtccaattaagatttttttctttttatccatttcctattctgctaaaagcttctctacacttgccagcttcacacaaagcacaaatacttctgccgccttctccagctcctccagggttggataggtgggggcgatacggatgttgcagtccctggggtcttttccgtatggataggtggctccggcaccagtcatgacaactcccgcctcttttgctttgctcacaatggccttagcgcatccttccatggaatcaaaggagatgaaatacccgccgtgaggtctggtccactcaccaatgcccagctctcccagttctttgtccagggtatccagaaccatttcaaatttcgggcggagaagctctgcatgttttctcatatgagcgtggagtccctccagatccttgaagaatttcacatggcggagctggttcagcttgtcatggccaatggtctgaatggtcatatattttttgaaatctgccaggtttgccttggatgccgccacagcagcgatcccggatccagggaagcttaccttggaggtggatgtaaatttgtatacaatatcaggatttcctgctgcgatgcatgctcccaggatctctaccaggaagtcctggttgttgtcatataaatggtggatactgtaagcattgtcccagtaaatacggaaatctggggcagccggttttaagttggcaaaacggcgcaccgtgtcctctgtgtaagtgatgccctgaggattggagtatttgggcacacaccagattccttttacagccgggtctgtgcttaccagctcctctaccatatccatgtcaggaccagtgggcagcatgggaacgttgatcatctcaatgccgaaaaattctgtaattttaaaatggcggtcatatccaggaaccgggcagaggaacttcaccttgtccagcttacaccagggggtatttcccataactccgtgggtcatggaccgggcaacggtgtcgaacatcacgtttaagctggagttgccatatataataatatggtccgggtccacctcgctcatggctcccagaagacgtttcgcctccggaattccatcgatgactccatagttgcggcagtctactcctgtctcgcatttcaggtcaccttctgccagaaccttcatcatacccatggaaagatccagctgatctgttgcaggcttaccccgggacatatccaaagacaggccttgtgctttcacttcttcaaactgcttgtctagttcacttttcaaagagagcagctcatccctgctcatttccgtgtatttcttcataattgtcctcctcattggccccagattcacctgcagaccgtttacttttccacattatcactttattctagtatgcgcatttatcagttgtcaagtatcaacttatacaacttcagagagtctttacgaaaaaaatgaataaatctcacagtatccaccaatttgttacataaaagtacagtgtatgtcctgtaaatccatcccaatccagaaatcatgggttctatgtatatgagtaaaaacacggccgaaaaacgtttacttggaattgattttattggtaaaaaggaaaattgtgcaggacttcagattgctgactttgtcccattaggatttgcgagagatcatgcaggaattcatcagggcagtcctaatattttttctaccttgagatatcatctttatgatggaaaacagaatgcaagataccgatttggagtaaaatatatgccataatttacagtcagataagaaatacatattgacagtccatttgtcatattatattataagtatagggattgggagatgccaattacgttgttgtgcagtgcatgacagataatcattggaatggccaaaagccaagtacagagaaaagtacagtcggcaacgaaccctataccagaagagtcaccgtgtcaggtggctcttttgtgtatgcaaagatattaacagcaaaggaagctcttgcctttgaaggaaatttcccctatacttaagaccaatatgagatggaactgttaagtaatattgttgaataaaagaaaggttgaaaccattatgtggatagcggacggttggaaagaatatgaagtgattgatacttcctgcggggagaagctggagcggtggggggattatcttctggtgcggccagacccccaggtcatctgggatacccccaagacgcacaggggctggaaaaaaatgaatggtcattatcatagaagcagcaagggcgggggagaatgggaattctttcatctgcccaagcagtgggacattcattataaaagtcttacgtttcatttgaagccttttagttttaagcatacaggactcttccccgagcaggcggcaaactgggactggtttggggagaaaattgaaaaggccggacggcctgttaaggtgctgaatctatttgcttatacgggcggagccactttggcggctgcggcggcaggagctcatgtcactcatgtggatgcctctaagggcatggtgaactgggccaaggaaaatgcagccgcatcgggattgggggatgcgcccatccgatggctggtggatgactgtgtgaaatttgtggagagggagattcgaagagggaatcagtatgatgcggttattatggatcctccgtcttatggaagagggcctaagggggagatttggaaaattgaggacgctattcatccccttattaaattgtgtgtaaagctgctcagtgatgaacctttgttttttttggtgaattcttatactacggggctggctccggcggtgctgacgtatatgctggctacggaattgaagaaatttgacggggtggtggattcacaggagattgggctgccggtgagtgaaagcgggttggttttgccttgtggggcgagtgggaggtgggaaagcagggggcgctaagcgcagcgccccctacgaccccctgggcgcttttttggaagtgtttgacgcagggggattggttcaggggaagttgagaggggtaggggagagggttgaatcatgattagattgggggcaggggatttttgttctcttattgaaatggaaagcctgttttaagaatggattgccagttacttttggcatacaaaaaacggacaacggttacctgttgttttgcttctaaaatgtggtaaaaagcgagatagttattcacgttggtaaagcgaatcccccaggaagaaaggatgcggtcatcggccaatgggattttctgtggatactgggaaagggcgtttatctttttttctgcggtatccagcagatggtcagcggcttccgggtttttcagtgtaaattcaatataatctgcagcacttatcatatcccgctgagctgtctgtgtgatgtgaatgtgataattcactttttcctgcggctccttatctcggacatggcttcggaaaacgggcgggttttaccttctgctatatcggtaagaccttcctggagaagcccgtataattcaaatttgcccaccagattttcataggcttcgatgctcatgactgcaagatcaccttttccatttttggtgatgaataccggttcggaatagttatgacaaaatgtggaaatttcattgtagctgttccgtaggtcagcactggaacgaatagttggcatatcttgcacctcctttttttataacaaaattataactgaatttctttatatagtcaacgcatacaggagaaaaaagaaatagaaagaaggacgtatatggcaaaaataaatgatgtatgatttttagcagaatatattacctatggttacagaacatataaaccttcaagagcggttaacaacccaaaacattgacggtatttatttttgctaatgaaaatattttgtccatagagcaacaaggaaagtatctgctgggcggagtaaatttgctggatattgaagaagttgtagattgggatgaggaaaaggaattatgaaaaggcagggctcgtggggtgacggggggcctgccttttttgggtgtttgatgtggggggtaaggcggtcaggttgaggtctgggctgcgtgacgggggtcctgccttttggggtttgggataaagggttagttgatcttgatcacggcttttactacgtcgtttttgttgttgatgacgaaatcgaaggctttggcggtgtcttggaagtcgaactcgtgggtgacgattccggagatgtcgatgaagcctttggctacggcgttgatggctctggggtagatgttgcggtagcggaagacggattttatggtggcttctttgttcatgatcttggcgaaattgtagtcgatgatgtcatcgggggccaggcctaccaggacgatggttccgccgcgttttacgatgtaggaggtttgtttgatggtggctttgttgccggcggtttcgatgacgatgtcagcgcctctttggttggtgagggtgtcgatttcctggacagggtccttttccatggcgttgatgacacgggtggcgcctaattttagggcgtagtccagacgttttggcattacgtctactacagtgatgtcggtggcgccgtaggctttacaggctaagagggttacaaggccgatgcagccggagcctaggatgactacggaatcgcctagttttacgttgccctgggcggcggcgtgcattcctacggcaaggggctcgataagggcgccttctttggtgctgatgttgtcagggagcttgaagcacatgttttctgggaaagcgatgtagttcatgaggcagccgtggtagggcggggtggccaggaattctacgtcaggacacaggttgtattttccgcttttgcagaattcgcactggccgcaggtgattcccggctccagggctacacggtcgcctacttttagggtggttacgtctttgcctacttctacgatagttcctgcgcattcgtggcctaagatgaagtcgccttctactacgaaatcaccgatagctccgttttccagatagtggacgtcggagccgcagattcctacgtattccatttttactacaacgcttttgtcccctgctgtgggcatggggatctcccgcatttccatctggtttaaaccggtcatatatactgcattgtttttcattttgtgttatcctttcttatttttcatttatttatagccctggagggttttccttcgaagcaaagtgtgcatcctgcctggagggccttattattacaaaggaaagtttgcagtgctttccttcttaatcagaaaggggaggcactcctccccttctggttcttcttgctttattgaactgctgtggacaggatcagtcgatcagacctctttctttgtacatttctacaaaatcagatgcattgtctttggtgatgagaactgcgtcaatatctgtgtcgatctgtttttcctctccggtgaggagcttgtgaacgctttccatgttcagctctgccaggtcaatggcggactgaagacaggtggcggtcattttgccttcttcgatgagcagacaggcttctgcggttccgtcaacgccgtaggacaggatatccttgaactcttcttttccggatacgacttccagggcgccggctgccatgttatcgttcatggagatgatggcatcgatcttgtcattggagatcacccagtcttccatgtactgaactgcttcgtctttgttccagtttgcgatctgctcgccaacgatctctacgtcttctctcttgtcaaagaattccttctgccaggcttctcttctcttgtctgcgtggaagttgccggagggtccctgaaggacaactaccttggcattttccggaacctgctccagagcaagttttgcatttacagcggcctgctcgtatggatccgcatccacggaggatgctccctcaatgccgtcaatacgtgcgtttgtggtgatggcgatgattcctgcctcaacgattttttccacatatggtctctgggcctcgccattgtttggctgaacaatgatggcgtcatatttattggttattgcgttttcaattgctgcattttctttctcgtcatcggcctggccgtcaaatacatccaagctgatatcatcgtacttttctgcggctgccatcatctcattggcaagccaggctgcgaaggagtctgactgggctcttgcaatgtatgcaaccttgtagccgtcgtctgcctgtgcagtgactgctcccccaagcatagatactgccattgccgcgcttacgaaaccactaactaactttttcctcataatacttacctctctttcttttatagaaaaatattctgcaatatttgcattccttttaaaaccaagctgcccctggcaggtccggttctctttggcccataggcctatgctgcttttttctcgctgctctcctccacaaggatgacctttgtggtcttctttgtcttggaatggatatcccagataactgccagtgcgatgatcacaccttttacgatctgctggacataggagtttactcccaccaggttcatgatgttgttcagacagccgatgatgaaagcgccggccagagttcccatggtggttcccacaccgcctgaaaagctggttccgcctacgatggcagccgtcagaccttccatttcgtagcccacggcgccgttgggaagtcctgcatttacacgggacatgaacagcacgcctgcgattcctactaaaataccgttgatgacaaataccatatatttattgcggaaaacattgataccggatgcaactgcagcctcttcatttccgccgatggcgtacaaagagcggccaaatctggtctggcgcaggatataccagatgatccctgtgatgaccagcatgaaaatgatggacaccggtactggtccgatggttccctggccaaagacaatgtaatctcccaattggttgatgttctgtccttttgtgaacagcaaggcaattcctctggccaccatctgcattgccagggtggcgataaagggcggtgtgttaaagttggtcaccatcaaagcatttaccaggttacaggcaatgccaactgccacagccacgaaaaatgcgatcaccaaagagcctgtactcttatagatacttactgagagcacaccagacagggccaatacagcgccggctgacaggtccagcataccactgatgatcagaagcatttcaccgtaggccagtatggtggccacagccagctgcttcataatgttagaaatgtttcctgtggacaggaagttcttgtttaatatggtacaaaaaataatcatgatcagaagaacaaagaatatggaatatttctccataatctgatttctgccttttgctttattcatagtctccctcctacatagccccagtggcgaaccgcatgatcgcttcctgggtaaactcgttccggttcagcttgccggtaattttgccttgattcataacataaatactgtcgcacattccgatcagctccggaagctctgaggataccatgatgacacccttcccctcctttgccatctgcaccatcagcttgtaaatctcgaattttgctcccacgtcgatacctcttgtgggctcatctagaatcaatacatccggatcacgcatcatccatttggcaaggaggaccttctgctggttgcctccgctcaaggactgaatggcagtctccagggtgggggtcttcacgttcatcttctggaaatactggcccacgatctgtttttcctctttttcatgggcatagccgccgtaaatgaccttttccagactggaaatactggcattttccatgacgctgcggatgggaatgattccgtaccggcgcctgtcctcagacagcatgatgatgctgtttttaatactgtcggaaaccttgtggatggaaatctcttttcctgactttttgatagtgcccgaggtaatggggtccagaccgaaaatagaacgcataacctctgtccttccggctcccaccagacctgcaaatccaatgatctctcctcttcgcacctggaagttaatatccttataaacgcccttgctgtataaatccttcacctccagcaggacttctccgatcttgacctcttcctttggataaatgttttccatcttccggcctaccatgagggcgatcaccttatccacgtccagctcgctggccgggtggctctccacaaccgcaccatctcgtaaaaccgtaatgtcatctgcgatctgaaatacctcgtccatcttgtgggatatgtagataatgcttactccttgctctttcaggacctggattttcttaaagagagcatctacctctctctgggtgatggcagaggtgggctcatccataacaatgatctgtgcgtcattggatatagctttaatgatctccagcatctgaatatccgatacggtcagggtcttcatcttctgggacggactgtaaggcaggccctccctgtccagaaattcctttgtctttttccgcagctccttccagtccaccttcttggatttggtaaccggaagccttcccaagaacagattttcctccactgacatctcaggcacataatttaattcctgggcgatcatggcaatcccgttctgacgtgcctgtatgggattttgaatcttcacaggcttttcatcaatataaatctgccctttgtcgggcttataaataccgttgatgatcttcatcagggtggatttcccggcaccgttctcaccgcacaatgcgtggaccgttcccttgcggacagcaaaatcaatattgctcaatgcctttactccaggaaaggatttctcaattcctgaaacccgcagctttatttcctgtcccatgttcttcctccttgcctttcctttttctagtcttactatacagaaaaatacatggccttcacagaaagaatttttgaataattttgtattttttcatgatttttattgtttattatttaacattgtactttttaagaaagttaatgtattttttaatgaatttatcgcacaatatgcactatttcgtcataatacgacaaggtcaaaaaaaggacctctttgcgaagtccttttgcctgattaacacacatcgccacacctgctgcccttttaggtattggtgtggcactgttcttttttaatgactgttcttcatacagtgctccctgtactctgtgatggtcattcctgtatactttttaaaattcttgctaaagtaaggctggtcgttaaagccaacctcctcgcacacctcagacactgtgatcttgggatccagcagcagcttcttggcatgctccatccgaacctgggtgaggtagctggtgaacttaatatccctggatttccggaacagattggaaaaataatagggggagatgcccacatgggaggccacctcctcaagggtgagcttttccttatagtgctgctccacataattctccgccctgcggatgagcagctccacattgtcaatggtggagctctcaatacactccaggataccctccagataattctccaggatctcaaatagattttccagatctcccgctgccaggatcttcttctgatcatccaaaagcccttcattcttctggctgatgtattccttgcagctttgccccaggacattcacaagctggatcagctttaacttcaaatccagggaggacagatcgctgtccctgcagttcttccggattccctccagtacacagcgaaagcctgcttcatttttatttaccagatactccgtgagggctgcggtctgctcatccgtatacagctcgcacccgctgcgcttccccttccgctcccagtcctgctgggaaatataactgcccttctgcgcgcaaaacaacctgtccgccgcctggaagatccacgggctgtttttcctgcagtcctctatagtattttcaattctggtgctggcactcttaaattcaatatcaaagtactggtgaatgctcctgtggatctctcggatttcctccccaaggctcttctgctccagattttccgctgccagaaagcaggtaatggaggtgccgaactgtttggaaaagcaatatttatattttcccagaagggtggtcacaatgagctgcatacaggcaaagagcagcccccggccggcgtccctggaatcctctttttccccaagggcagaggcaaaatccaactgaagaaagcagtacctgtgctggttccatggaatgtccatttcctgaaacttttcctttaccagctccaggggcttttcttcatttagtaagaggcccagcagcagctctccctggttttcccttttttcctctttcccgctctccttcacttcctgtatgccgcagccccggtccagcttttcccgcttggccaccatcatggcctcaatctcctgctcctccatctctgccttgagaagatagtcagaagcctgaagctgaagggcccttctggcatagtcaaactcatcgtaagcggtgagcacgatcacctctgtgtcaggcttgagcgccttcaccttttcaatgagccacaggccgtccttctggggcatacggatatctgtgatcagcacgtctggccggtggaccaggaactgttcataagctgtctctccatttcccgcctcccccacgatctgaaaaccaattttctcccagtcgatcatagagcgcagtccgatacggactaaaatttcatcatcaacgatcattaccttatacatcccgatcaccccttttggtatctgctgctgtgtgcggttccaacttgtttcctccatggctgagatgaataatgatccgggtgccttttcccggctccgattcgatgtgaagtccatcctgctccccacagtacagcttaattctctggttcacattgttcagccctactttgctgaacttatggatatttttctcctcctggaaaatatttgagatggtttcctttgtcatcccgggtccgttgtcctgggcaaccacctccacacctccttccacatttctggtatagattcgtatggtaagctttttctcaccggtctcgtctgcatcgtcaattccatagatcagggaattttccacaatgggctgaaggatcagctttggtatgagtatctgctcatgctcaggcaggatacagcattcatagtcaaatctctggttgaaccgcagccgctggatcaaaagataattgtccacatagctgacctcctcctgaagctgaatcatctccttgccaaagctgatgctgatccgcaagaggcgggtcaaggcactgatagcgctgctgatactctcctcccccttgatctttgccataaaccggatggtgcttagggtattgtacagaaaatggggattgatctgggcatgaagaacctccagctccagctcttttttgttccgctctgaggccaccaccttttccatcagctcccggacccgctttaccatgtggttaaagctctcccccaggtccccgaactcgttgctgatgttggtgtccacccgcacggtgaggtttcctccctccacctttttcatctgtccgatgatctttgtgacaggatctgtcatccgcttaaagtatagataacctcccagaagaattaccaggaaaacagccccgcttcccagcatgatctgtctctggagcttcaccacatccccgtagagaatggactggggtacattttttacgattttccagtttcctctgtttaagctggcgtacaaggccacataatcctccccgtcctccttgtgctcctttgtgccagagtcctcctcctttaaaatctcctgaaggtaggcatgattgcgcaccagggtggaggaaaaatctccgctctggttggtgatcacccttcccttcctgtccatgatcaggatatcgctgtcctcctggcttacagaagcatagacctcgcttaaggtctcctcgttgagctccaccaccatatagcccagctcttccagagaattgacgtcgatgatctttcttcccagggaaaaacacttcttggggattcttcctgagagaatgcgtacctgaatatttcttgtgggcatccatacaatctcaccctgggtatttttcagctcctggtttctgaagctgctctggcccccgtaaatatcagcacccacatgccagtatccgtaccgggtcataatataaatgccttctatataaagactggacataaaatagctgttcagctggggaataaattcttccttatttccctgctccaggctttcaatcagctccttgtttaaaagaatggagttggtctgattttcaatatcctgaaggatatagtctatattctccgccacagccatcacagactgctccgctgcatctgcgtactgacggacaatgatctccttcatattttgaaaagccaccaggaacaaaagcatgaccaccacacacacagcgatcacaaaggccatcatctgccactttaattttctctttcctcttttcatcctgtcagcctccgtttgttctggtgctccggtactcctcccattcctgccagatctgctctcccacctgcttcggcctggtaccttcctgaatcatgctgtagagattttccgtaaggatcctctcaaactcaaagcctgcgctcattttcggacgatagtacacgtaagtctgcttctgggcattgatcactgccggtgcctggggaagacggaccatatactggcctgcgatcagatggagaaggctggttctggtgggcatatttccgccctcctctgtaaggaaggtgttgatctgcacctgaggagaggtgcaccatacaatgaacatccatgccgccagctttttttcctggctgatgttcttgttgatccccaccccggagcctccgtagatatttgcacttctctggcttccatagggcaggaccgcataccccgtcttcccggacaccgaagaatccttgtcattttccatcatggcagcgttctcatcccagtttatcatcatggcaatttttccatccttgaacaactgggcggtttcatcccagttcatctgtcctgcctgttccggcacgatccgggccattctctggtacatccccagagcagtaaggaaggcctcctccctggatcggatctctcctgcacattcaattcccagagtagatacctggtcatctgaaaaataatccccgccataggcgcttaaaaggttggaaaactctgtataaatggaattatgattggctgacatggtgacgcaggggtaggtgatctcctccttgggtacatgttcaccgatccacttagccgtctccataaactcctcccaggtaaaagccgcacttccgggcagggggtgaaatcccagatcctctgtcatgtcatctccgtatttatcaaaaatatccttcctgtaataaagaatcatggttgttgagtcaaagggaatggcacaaagcttgtctttgtcttcaaaataggagcagatattcacctgatcctctgaaaagctgtccagccctcccacaatatggggaagcttagggtcccgctcatacagatagagatcctccaggctgtcgctgaacctggtcaaggtctgatagggatctatgtagatcaagtcgtattgtccaatgccggagataaactccatgttgatccgttcctgcatggtattaaaatctgcattgcggatccttacattaattcctgtcacctgggagaacttgctgcattctcttgagagaatattggcgttaatattattctctacgatgaaatccaaggttatccccttgcactgcttccaatcaaaggtctccggggctgtgacatttccaaaggcgcttttcttgccgccgaaaagctcctgaaccattttcacctcctggccgccctctgcagatacgggtactgcctggaccagcagaacccccgccactatctttgccaacagcctgcgcatcttctttctcataggaccgcacctctcttccatactctatcaccaatctgcggcgactagcacctcgccactacgctctcgctgctaaatcatggtatcagattggcccttgccaatctgcggcgactagcacctcgatgctacgctctcgctgctaaatcatggtatcagattggcccttgccaatctgcggcgactagcacctcgatgctacgctctcgctgctagtcttcattataggagaaataattatatttggcaatttattgggacatttatttcgtaagtcacgtctaataagtagaaacacacaaacttgtggtattctatacgtatagaaagtagaaaggaacccaaaacatggataatctcataagaaaggcacagaaacaagatccggatgctttttcccagcttatccaggagcagatgcagaatatgtacaagactgcccgcgcccttctctccaatgaagaagatgcggcagacgccatatccgaggccattctcacctgctgggaaaagctggacaccctgaaaaagcccaaatacttccgcacctggcttacccggatcctaatcaataaatgcaatgacattcttcgaaaaaaagaattgctttattatacagacgaagttcctgaaatccctgtccaggacaaagaatatgccaacctggaatgggaggaggccctgaaaagtctggacgaaaaatacaggctggtgatcctgctgtattatgtccagggctttggcaccaaagagatcagccagattctggaaataccggagagcaccgtccggacccggctgtcccgggccagggagaaactggcatcccaatactacccagaagttaaaaggaggaaattcacatgaaacaagaaaaagaccaactgatcaagaccctgcaaaaagaggttgtgattcctcaaattgtacagaaaaaagcagacgctgccctgaacaccatccgcacccgcacagaaaccgcagaccgtcacacaaccacaatccatctgtcagccagaaaatcccccaaaagaatactggcccttggtgcagcggccgccttggttgtgggctgcgtctccgttggggctgctgtttataagaactggagccggagcctggaggagggtcttcgcataacagaagaacaaaaaacagccatggaagaaaatcactccgcctccaccatagaccagtcacaggtagtccagggcatcacagtcaccgccgcccagaccattgtagacagctattatgcacatctggcctttaagattgaaggctttgacctgccagagggcaaagagcccggctttgaaaatatttctgtgaccgtggacggcatatctgacatggacatctcagaggatgccacacagaatttctcctggggcggccagttttataacggccttgttgtaggcgaaaacggaatggccgtttacgcagatggaacgccgatgtcccaggacgggattatccagcccaaatatcaagcggaagacggctccctggaattccagctcaccctggccaacagccggaagaaaggcttctttatagataagcctattcatgtggagctgaaaaatctaggcactgtagaaaacgccgcattcacccctgcaattgatggaacctggagctttgactggacactccagggctcagagaatgtaaaagaatttaacttaaatgtacccctggagggaaccaccgccattgtcactcaggctgaagtatcccctatttccctaaaagttctgtataagttcccacgggaagagatcgtggaaaccttccagacagaagacggaacggaagacacctttaccagatacgcagagccccccttccctgccggcgtaaagctaaaagacggaaccctcctgccctacctctaccttggcccaggctcctcatcctatacctctgaggacggggatgagtatatgtgcgcctttgccattgaccgaatcctggacgttgaccaggtagaggccctcctgcttcagaaaacacctgcagaaaatgggcaagttccaacagaagataacttctatgtggttcctttgggatagcatatagaattccagaaaatgaacagccggacgtggaatccggctgttcatttcacccctctgccttcttaaaaatatagtccagatattccttttttatttctccccgtctgtcccgagacaaagggatctcccggccatctttcattagaaagctgtcttcacttaacttcctcacatatgccatatttaccagaaacgaacggtaacaccggataaaacttccttctgacagcatcttttccaatacagccagcggctggtaaatcaccatttcccctttaacacaatgcaaaatagtcctgtgtccatacacctccatatagagaatgctgtcaacaggaatttccaaatctgcgtagtcgctggttactctcagtgtcctctggtgtggaaggattctctcctgtactctgcgcatagcttctgagaaatccgggaattccacaggcttcgtcaaatagtgtgcggcatccacctcaaatgcctctttatagtgctcctgactgactgtaataaaaaccaaggccccatgatatcccttttttctaagaatacgggcggcatctactccagaactgctgccgatataaatatccatcagaatcacatctgccttccttgcctccttactttgcagcaaatcatctgcactggtaaattccattatactgattggaagtcttttctcctttttataacgactgcaatatactacaagtgtttccctgtcctcccggctgtcatcacaaattacaaccagcatagtttccccccttcctgcgtaaaaatagcatttatgttatagcatttttatgtgatttcagccattccatttaaaccatctgctttaataagtcaatcctccttacttttttcagcactcccattcctcaccgctgtatgccacattctcctctacatccattgtgcggtcgtccaccgggtaagaactccggcgttcctccctcacccgcgccagccgctccataatcctgctggccaatacctcattgtacggctcctgctgagtcgcaccgcttcctcccttgagcaggcagcatttcccatcaaggattgcccatttcttcttcagccagccgtctgaggtgttgtccggagacatcaggatgaccgttttgccgctggatggatgtccaaacaggatattacccacatccccggaaaatggattttcgaagaagttcacttcattccatgaaacctgcctgtggatgggacagatccaatactgatccgatagagaaaatcccagacatttgtccagcaacatctgcggagaactgatatgcagttcctccaacgcatggcgcagaccggcacggcttgcagggattgcccgcccccgccaccattcattgagcgcagcgcggtcaatcttccccttttttacagggatccccaccggaacatgagccggattaatgatctcctcaacagcagaaaccgaggccgtttccctgtccagacggattgccgccacagggatttccctgtgcatcaaaagatatgtttggattgtttctaccattttctcaactccaatctattgttattattctaccaaatcccagggacttaaacaagcggctttgcattgcttcagagatgtggaataaactttattttttcttatattttttcttccttcctaaacctcgtataatgcttttcagcacttaatcgttggtgttttaaccgcccatgttctgcacatcacataatcctgctccaacactcttccgggcataaaaaaacccggcaacctcattcctaatgtaacatagatggttttttactgatattctcattttttccatttacacgattctacctaccatatctgtagatttaggatcttcatttatttcggtttagaagtcatttttccggtttaggaactacttttccggtttaggaacaatttattgcaaccgtctgtataatctgtaaaaattaaaatgatatctattgttatcagtatcttaaaaaattttaaaggaggaaacttatgaaaagaagaaaaagaacagaaaaaagactgcttgccgctctacttaccgctgcaatgagtttcacaaccagttctgccgtatgggcagaagctgaaattgtggaaaacactcaggctgcgcagatacaggagttactggatgtgacagtggaagcagcacaggaaaaaacagattctcagcccgcagaatcactggaggagcctgtatcaacagattcctcagacccaaataccccccccctctcaaaatagcggcaatttaaatgagcccatctcttccggtcctgtaaatatacagcagaccccattctcaagtgaaacacagcttgattctacttttccaaaggatttattttcatcagaggataacggcatagaagtacaggctaataccgacaacgccgactattcttggtttaacgaaaacacctatgatacaacctacaattacactatttccactgcctctcagcttttgggtcttgcacacattgttaatggaacagataccttcgcaggaaaaagcaaagactttttaggaaaaaccattaatctcaccaataatattgacctgtcctcatttgacgatgatggtgactcctccaatggcaactggacccccattgccacctgtcaattagacaataacggtcaaatattgcctgaaagcaactattttgcaggtacctttaacggaaacgaatattctattacaaatataactataatacagccctccgcccgctgcctgggactgtttggatatgtcaaaaacggaactgttaaaaatttaaaaataggtaatatcaagttccagggtgatcagggtcacacctacggcggaagtattgcaggttacatgatcgagggaaccattgtcaattgtgaaacgcttcccaatactactttctcaatactaatgggtaccgcgggaggacttgttggatgtgccaaagactccgacattcttgactgtagcaacaatgcggaatttgtctatcatgaagacgaatggccaaaaggaggtctttccggaattgtaggtgtataccgtgcttttcagccagactaccacattcaaaattgtacaaattatagttcgatcacagggagaactgcggctggcatcattgcctctatgttcggaggaaacatctccggctgtacgaattatggagatattaaatgtgtcaataccaataacgcaggaggaatttttgcagcaagaaacaccaatacagaggacacacagccactgattgtaaaagattgttccaataccggcaacattacatcaggggatgttgccggaggcatcggcggaactctctggaattctattaaaccacctgttctcatcgaaaactgcagcaatactggaacgataaccggcggagctgacggagctgctggaggaattttcggactttccatggcgagcttcccacaggggcttacaatcaacaaatgttggagtgccggatcagtcaatgggtttatctccggtggaatcataggagcagccaacctcttccacccccatgaaacgatcacaaactgtacggttctgtgcccctctatttctggtgagggctatggagatattttatttgattatggtgaaaaccaagatccccagaatttcattccagaatcccagagaaccggaaacagcatttggaccggaacctctgtaaccggctctgagaattctcctgccggcaaaggaattcccgtatctgccgccgccttaaaatccgatgcctattggacagctctgggcatggcaaaacccgcccaaattgaaaaatacctcacctgtaccgtacatacctggtcaggctggtccaccgtctactctccctcctgtaccagctacggcaggcaggaacgcacctgcagcgtatgtggcaccacggaataccgctctgtcgccccctacggacaccaaatgatacacggtatctgcaccatctgcggctacagtgaactcttgcctgatggcagcaaggtagaatctgacggtaccatcaccactcccaacggcaccatcgtcctccctgacaacaccatcatcctgccagacggaaaccagacccatctggaaccctcccaggacggacagactgccaccatagataaggacggcaccatcacagatatcaacggagtgaagatcagcaaggacggcacctatacccttcctggacagaaccccgaggatccctctgataacttgaccatcgtcccttcccaggatggcacatggcctgcgtatgaccgggaaacaggcgcagtgcgtacaacccaggacggggctgttaccctgccagatggcaccgttccggacttccctgcaggcaccgtcattacttctgacggcctgatcaccactccagacggtacctcctatgactcctcaggtactgtcaccaagcccggcagacccgttccagcagaagaggatcccatccgtgtggaacgaaacaaggtatatgtgaatcttaaggaaaacaccaccgctgcccagggcttcgatttctccctgatccggggagaagaattccaagaggagaacctgtataaacttatggagaacgtggatggaacttccacacgctttgacattatccgaaaaggtatctacggtgtattcgcccgctcctggttcctggacacctcaggagagaagatcaccggggactggacccttataggcatggctgagaccaccacagacactccaaatgccgcggccattctctccgtaaaagttaaaaatagaaatgtgactgtaaaattcagccgtcccgccagggcacagggctatgacgccatgctgggcaaaaaactaataaccttagacaacgaactgcgccccggcaattatggcccttatcttaagaaaaaccaaaagagcaccaccatcaccttcaccaatgtaaagaaaggaacctactatctgggtgtacgtgcctacatcctttccccagaaaacctgaaatacttcggccgctggaacatacagtcctctctcacgaaaattgtggtaaaataaattatctgaaacattcaaaatgccatggccgggagctctattcaactcccggccatggcataatttacttacaacttaatctgtgaatttaagagactttatcatttagaaatcaaaatcatcaacatttttatccgtaaacagagaaggtgctcccataacaaccgtcttgccgtcaatggtgattttcccaaaatcaggaacatccagatccccgtccttcacttcatttccatccagaatatattttgccagatagaccgtaagataccccagccttgcgggctcccacagaagaacggtgtcaatggctccttcgtgaagatacgttcttgcatcattaggcattgcagagcctaccacagccaccttatcctgaagacctttctctgatacagcctggcccgccccgatcggtgcgggagaactgaagccgataatacccttcagatccggataagtggtaagaagatccaaggtcttcgtatacgcctcctgcacattctcattggtgcatacaggatctgtcactaacgtaagcttgggatatttttctgccgcatattccttgccaaatttaatccactcattacaggagcctgcagtaagggtactggtgaggatggcatattctccttcctccgcccctatggatttcactaattcatcccaggtatattctgcataagtcttataatcaatttccttcactgacagatccaccacatcctcctctgcaggagaatcccagtccaggaccacaatcccttgatccctggcctgcttcagaactggtgtcaatgccgccgcgtcatttgccgatacagcaatggcatctaccccctggctgataagatcctggatcatcttcacctgctcagccgcatcagccacggtaggtccggtaaatacagcatccacccccaatgcctctccggcttcctccacaccgcttcttgctgcctcaaagtaagtaatccccacctgctttggcataaccacgattttgtactccttgtccgctgcccatgctcctgccggcagtgcacacacgcctacagccgttgccagtaatgctgctaacatccgttttctttttcccattttttacctctcctttatgcttgtttttttattaattttaatcctccatatttggaggtaataaaattcaaggttaatacaccaattaaaattacccctgtgatcactgtggtaagacttctgtccagtccaaagatattgaatccgctggagatgatctgcataatggccacggccaccaccaccccgaacacttttccatagccccctgcaatggctgttcctcccagcactgccgctgccacggtctgcatcaaataagaggaaccatagtccactctggcagaattatatctggacatcatgatgagcattgcaagacttcccaaaaatccggaatacatatataccttcatggtcaccttatttacattaattccggaatactctgctgccttcctgttgcttcccaccatataaacactcatcccccagggtgttctctccaaaaggagataggtgactgctgcaatgaccagaaaaatcaccataggcacgggaattcccacaattgtcccatttccaatccagtagaaggctgaaggaaaaccggaaactgaatttcccttggacaggtacaggccaatcccttcatagagtgtggaggttcccagagtcaccatcatagccgccgctccaatataggagaccacatatccgttgaacatcccgcacagggtagagatacccatggagatcacaacggctgccccaatgcagactccctcattcatcccctttgaaaacatagaggacatagctatggctgccacgatccctcccagcgttcctgtagtaaccaaagacaggttaattcctccagttaaaatcgccgccatcatagccagggcgaaaattccgaactccgggagctggaaggacatagactgaatattccttatggtcagaaaattctccggtgacaggacagacagaactatgaaaatcagtataaaaaccccgaacagtgtccattctttagaatgctttttcattccttcgcctcctgtcaatcaatttcaactttaatcagatgcttctctgactgcctcttgcggatgaccacaaagcagatagaaaataccataatggcccccagaatgatcttctgccaatacgtggagattttcatcaacgtcaatccattattaatgactgcaaacagcccaacccccagcatggttcccgtaatagtcccttctccgcccataacattaacgccgcctaagatcactgccgcaatggtcttcatgtcgtaacccacaaaggcattggggtccacctgcttcataattgaggtatgaacaacccctgcgatcccgcagataaatcccatatatccatacacaaagattgtaatcttatttacattgtatccgatgcgctctgcagaagtccggtttcccccaatggcaaagatccctcttcccaccttagtaaaccgcagaataaaataggtgagtccaatcagcgctgccaaaaatacaagctgaatggggatccccattttccctccgtgaccgtcaggaaatacatttaagaaggttatttttccaaaatcaataaattcctgaggaatattattaatataagcgccttttgtgatataaagggccgtgccgctgatgatactatacattcccagcgttgccacaataggagggattttcacccaggcaatgagaaatccattgacagctcccaggcaggctcctgctgccgctcccagaagaaaggccagaagcacattccctgtaatatgtaccataaaattccccacaaccaaggtaacgcaggaaataatagctccaatggaggtatcgatacccccggtaatcatgaccaaaagcattcccagagacacaattgccaggatcacattggtctttaagatattcaaaagattgtccggccgcaggaaaacaccattttttaaggaaatcaccagcatcagaagtaccagaagcatcacaagccccatttccctgcttttaacaaattttttcatgattctcctcctctatgccttatccccggttgtgctcttgcttaaaattgccgcattcataatatgctcctggtcagctccctcgccgtccattctcccgttgatccttccccttctcataaccagaatctggtcactgacagctaaaacctccgtaagctcagaggagatcatgataatccccattcccttagaggacagctcccgaagaaggctgtggatctctgattttgcgcccacgtcaattccattggtaggttcatcgatgatcaaaatcttaggagccgtggccagccatttggcaatgacgattctctgctggttgccgccagaaagcttggaggccagcatatctggatatcccggcttaatatttaaggtatggatccattgttttgccgtatcctgctttttcttattgctgatgagtcttcccctgccccggagcttggagaagatggtcatcacgatattgtcctccacggattttgtaaggatcagaccttctgtcagcctgctctccggcacataacctatcccgtatttcaccgcatcctccatggaatgtatggatgcctttttgccctccacatagatctccccgctgtctgccggtgcgatcccacagatggcctgaaccacctctgtgcggcccgcacccaccagtccggtaatgcccaggatctccccctcatggagcgcaaaggaaatatccttaaaattcccctccttggataaattcttcacctcaagaagtgtctttccaatacactgggctccctgatgtataaactctaccttcctgcccaccataaggctgatcagcttgtcgttgtccatctcttcccttggataggttccaatgtactggccatccctgagcacagtaaaaatactggacacctcaaagagctcctccagcttatggctgacgaacaacacagagatcccccgatgctgcagattacgtataatcttaaacagcagctccacctcgcttctggacagtgtggaggtgggttcatccataatgatcagtctggcatcacaggccagcgctctggcaattgccacaagctgctgcttggccatggaaatggtctcaagacgggcctccacatcaatgtccactcccagagtttccagcgcctcctgggccgtgtccctcatttccttccagttcacaggctttccctttttctccaactggctgctgatggatatattttcagccacagtcaggttgggaaataaggagaaatcctggtagatcacaagaattccctgccggatagcctccatgggagtaagtgtaggataggactttccctcaatgaggatctctccaccctggtcaggatggtaatttcctgccaaaattttgatcaaagtggatttccccgctccattttcccccacaagcgcatggacctcacccttctttacctccaggtgaatgttgtcaagtgccttgactccaggaaaggtcttgctgatattttttaattcaattaatgtatcgctgcccatgtcctacctccccatgactgccactatctgttgtaaaacgcctcacttaatgtacggtatctgcccggagcaccgggaagctgccagcctagctggcggatcacctgatccagcccatccatatcctccttcgtcagctccagaagttccccgcccataacctgggctgccgcaatggattctgccatggattccatgatctgaatggattctatggtctccagagcattcttcgcactcagggccactaccccatggttctctaacagatacccgtttgcatcctccacataaggatcaaatacataccccagatcctttgcattgggctctgcatagggaatggtgatcaccggccctaaaagcatcatagcctcagggatcagcggcttcatcatagcctgtctcccttcctgggtaatggacattccaatgcacacaggtggatgagcatgcatcacggccttcacctccggccgtttcttcataatatgaagatgcataaaagcttctcccgtaggcttcttcccttccggagcgaagatggtatttccctccatatctaccgcacagatcatatcaaaagtaagctttctcttgggtgtctttgtaggtgtgatcaacaccaggttctcatccacccggtaggatagattcccacccacactggctccgtatcccagctcgccatctcttagacatacctccaccatttcgtttatctgtgcctcatatttcctttgaatctcattcatcgtctcttctccccgctttattctacacgtttttccaatgaaatttattagtaaaggattggtaatttaaattccactcccactgactttctggttcatatacagtccccgccacaagctccttcacaagctctcttccctgggccagatcctttaccatacccatggcagcagcctgctgaagaaagtttcctgtaacagatgcctctacgacccccgccgtcaccggacggtttaatagattggccgtccactggcataacagggcattcctggcgcctccgcccatgatggtcattttttcaaaatgataacctgcaaacttctccagacagtccacggaatagcggtaccgatataccaagctctccaaaactactctggaaatctcccccacagattggggaatcatctgccctgtttttctgcaatattcctgtaccttttccggcatttgctcgggcctgaagaaatccggtgcctccgtatcaatagctgccagaaatggctttgcttcagatacctgctgttgaatatcctgccaggataagggtaaaccatccttttcccaggcccttctacattcctgaaggatccacagcccagtgtgattaaatcgcagatgcatggcgccgtaaagtcctgtgtcattggtgatgccagcctgcagcatctctgcacggtcaacgggcttttttactgtacagcccatacaggaccaggttccgcagcttagatacaggctttcttccaggctttggctgtcaatgcatccggaggctgccgctgtatcatggcctgccaccgcaattaccctgggtatccttggcagtctcagctccttggttaattccggaagcatgggccccaggattgtgccgttttcaataataggcggaaaaagctcctcccccattcccagctctttcatcaaggaatggttccagtctcctgtgcccatatccaccatagaggaagtggctgccatcgtcctttctgatgccttacacccagataagaaataattaaataaatccgagatcatcaaagccttatgggcggaagctgtaagccagggctttttctccctgagataattccaaaaaaccgttggctggatggccataggcttatagagtgtctgttcaaacagccattggggactgaatctcttataaaattccggaagaatctcctccacgctgctgtccctgtagtgataaggatttcccagcaaatccccttccctatctaaaagacctatggtattcccccaggtatttacaccaacacagtcaaactccagccccatctgtgtgcatttcagcatgcttgtcttgatttcatggaacagccgcagcacatcccagtaaagctttccctgaagcttaaccgggtcattggaaaaacggtgaatctccttcatttccagacggccagcctgcaatctcccatatactgccctgccgttgctcgcacccaggtcaaaggccagcatctgcagcttaatcatgaaattccccactttcttttataaatagtacaaatccgggtcctggtaaactctctgtcccgtattcaatgttttcatctgttccatttcttccttggataaggtaaaatcaaaaatatttctattggaaagggcatgttcatagctgcctgtctttaccatcacagcagccccaagctgtgtgagataccgaagcactacctgagccggtgtcttctgatgcatttctgcgatctcgctgattattccagagctggtcatattccttcctcttagaaatggactccatgcttccaccagaattccattttcttcacagtaggccagcatgtcctcctggataaaatgcggatgcatttcaatttgattcaccataggctgtacaccgcccaaagtctttagctgctccagatgcgcaatggtaaagttactcactcccactgcccgcacgcgcccctcctggtacaatttctgaagggctctccaggtatggataaactgtcccttcatgggacatggccagtggatcagcagcagatctacataggttcccagccgttcttcactttccttgaatgcttccagggttctctcatagccatggtccttgttccagatctttgttgtcaggaacagtttctccctggggcagccagattgacggatggcctctcctaccattttctcattgccataatgctccgctgtatcaatagctgtataccctgcctttagtccatttcttatggcctggttcatggtttcctggctgtccgccaatttataggtaccgaatcccagcatagggatctccagcccgtttcttaaaactgccttctctatcatcctcttcctacctcaatgttttgcctgtgaaaacaattctctcattccattgtagcttcctgttggaccgggcatacgctctttccttgtcttcagcagagaatctaagccgtcgatctcctcatccgtaagcgtacggatcgctcccccaaaggttttgttgatcaaaacagactttgccatggattccataacctgaacagcctccactgtatccagtactccggtggagctgcacaccagacatccatgattggccataataaaaccattggatttggacagatagggatcaaaggaatatcccaggtcctctccgttgggctgtacataaggaatggtgaacacaggtcccagctgggtcatagcctctggcagtatgggaagacacatggcccgtctgccttcaggggaaagggacattcccaccagaaggggcggatgcgcatgcataattcccatcacatccggacgttccttcagaatatgcagatgcatgaacatttctccagtaggctttcttccctttggtatgtaaataggttctcccgatgccgtcacaacgcagatatcctcaaaggttattttcctctttacaattcccgtaggtgtgatcaatattgtattctccccaacacggtaggacacattccctccagatgccgccccgaatcccagttctccggcccttctgcacacttccaccacctcatgtatctcctgcctatatttttcctgtataacgttcatgataaaccccttccaaactttgttttgcaactttttccgttattatggtttgattgtacaatatgtttttccgtttgtcaacaataatatttcttttttcaaactaaaatctttgttttccaatttattcgttttaaggcagcaaaaaaagaatgcctgtctcataagcacaccccttatagacagacacccttattttctattcgtcgtttattcgatcgcttcctcaagatgcaaccagtaccttcactcccgcctgttcaaattccttcaaaatctcaggatcgatctggtcatccgtgataactgccgtgatcttctcaaggccgcacaccgtcacatgggcgatcccgttaaatttactgctgtcagccagaagatagatttccttggcctcctccagcatacactgcttcaccctcgcttccgcctcgctggtatccatgatccccctgtgcaggtccagggcagcgcaggacagaaaggccttctgcaggttataggaatgaatcgtcttctccgcagtgctcccccggaaggacatagactttttcccaagagtccccccggtgctgatcacagtgatcccctcctgctttgccaaaacattcatgatctccagggaattggtgatcacgatcacctctgaatctgcctgaatctgttcagacagcaccgtggtggtggagcctgcatccatgacgatcagatcccggggctttatcagcttagctgcctccagggcgatcttctgcttctgtgcataattgcatacgcttctttgttctaaagactgctccccggtctccttcagggttgctccgccaaacgtccgaatcaccaatccagcctcacttaaatagttcaaatccttccgaatggtctcctctgtcacatgaaaatactcacttagccccacgcttgtcacatctttggaatttccaagaatctccaaaatttgtttgcgccttgtatccttagacatatgtattttgctcctatgcttttttgattttccaactataattatagaatactataagaaagatttccatgcaataaattgtttccatttatttccttttttccatgaattccctacacaagcctgcctactctgccagctcactcataatctcatgcctcagagaccatgcctgacccatattctcgtaggtctttttatacagcctgaagaatctctcatagactttatgcttatccatatccggagaatacactttatctgtaacaaccgtacattctaccgcctcctggaaatccctgtaaatcccctgggccacagcattatttaaggcagctcctttcgcccccagctcctggcccttaacagttaccacctgcttgcccagcacatcggcaaacatctgacaccatacagggcttgaggccccgcctccacacagagtgatccccttaacctccaggggcatatgctcataacagtcacacatagcgtaggcaaccccttcatagcaggcccggatcaaatccccggccgtattgcgcacagagatccctgtaaagctggccctggcgttgggatctgtaaatggcgcccgttcccctccagccagaagataaggatgatagatcactccatttgccccaatgggagtttcttccaccagcctttgggcatagtcatatacagaaaggcccaaagccctggcctggcccttcacctgttctcccagaattcccagcagccactccaggttgggggttccggccagagaggccatcagccgcagccacttattttttcttgcatggaaaaccgtcattcccgcaaaaatatcatcctggcagggttgtccaatgaccatttcatggagagccgctgttccaatgatggaacagcattggccctcttcaatcacccctgctcctactgcgcaggcagccacatccataggtcctgcggtgaccaaaacatccttttcaagtcccagctctgaagctgtctccttcaaaagcagtcctttatttttccggcagggaagcacaggcggatattttcccacataatccttcagaccataaagggcaaacagctcctgatcatactccccggtgtgcatatccagaaaaaccaaagactgatccgtggcatccgtggagaggatgcctgtaagccttgcaaacagtgcatccttcaggtgcagacaataggcggcagcctccagccgcttgggctcatgggtggccatccacttcatgatgcatggctggtttcccgtaaaaaccctggtcccagccttctcaaacaccttttgggcagtgccgtcccttgtccactgatcgaaaacctcccctcctcttccgtcacaaaaacagcaacccctgcccacaggccttaattccctgtcgaaaagccacagaccgtccccctgggcagttatgccgatacctgcaatgcgctttcctggcagcttccccgctgcctcccggatacaaacctttgccttgtcccatatttcattaaaatcctcctcaaaccaggattccttatcacagtaagcagtaaggcttctctccgcctttgccagctcctggcccttttcatcaaaaaccactgctttcaccccagaggttcctgaatccaaacctatcatataccgctccatccgtagctccctccttttgcctccctttcgttcttcttcaatcttccataaggctgcgtataaacttcaggcctctcacagcctcctgatccatctgctcttcattggcatttcccgtaaggtctctccagatattactgtctctggacacggttccccctaccttcaccagaggctccagggtgatccctttgttatacccaatctcttttaagccttttgccgccagctcccaggccaccattggactggcatggggattcacccggttattctgtcccacatgaaaatgtcccagcttgtcgcccgccgtgacaatggcatcatagaaggaatcctcctcaatattcatatggaagatatccagaagaatattcacattgggattatccacctgatccaccagcgctctggcttctgccgctgtattcaagaggtagttttcaaatcggtttgtgatttccaaattataagaaatcccataatcctgggctgtcctgccgatttcctttaaggagacaatacttttttccaaatgcctctgcttctggtcatacccgtcaaaatcagcccaggcgcagtaattaatgccggaaaagcattttccatccagatcattcactacctccagaagtcttttcacatattcaattccggcccgccggatcccttcatccagggaagccggattctgctccttcccaagccctaccagaaaggcaaattctatctcctgctccctggccgctttcttcatttcatccagcttatccctggaatacgccaaaagccccggggtaaaaatctccaacacatcaaagccgcatttggcagcccttttaatcgttgacagatagtccccctcccaatccttagaccaatacgcatacacgatcccatacttcatgaaaatacctcctctttgactcatatttttgttatccaactgcttagttgtattttaacacgtgtttttttaaaaaacaagtaatttatttctgttttacaacttttagtattgacttttccaataaaatcatggaaaatcagattagagattccgcagagccttctcaacgccctctcctggcagccgcaatctcaaaaccccaacggcacaccccaggctccgccttgggctgctgcaggtatgtgccaggcagaaacctttgccccacagaaaactattcaattattccgaaaagatactgatcaatacgaggagaaatcttatgaattacgaaaaagagagaaaagaaatcatagaaacctgtctctggctggaacaacaaagcctggtcatcggaacctggggaaatgtcagtctccggctttctccaagagaatttttactgactcccagcaaattaccctaccgccttctgaagccggaggacctggtaattgtgaacgagcttggtgaaaagcttcatggcagccgcagtgctacctcggaaatggatgtacaccgcctcatctatctggcccgcccggatgtccaggctatcatacactgccatccccgctatgcctccgccatgtgcgcttccggccagggaatcccccccattctggaggagatgacccagcttctgggaggggaagtgcccatcacctcccactatgtaagggcaggcagacaccttgaacttgcccgggaaactgttaaagccctgggagacaaaaatgccgttttgatttccaaccatgcccctgtctgctgcggccgcagcctggaggaagcctgtacctgctgtctggttgtggaaaaggcagccgcctgctatctgtcaatcaaggaccggttccctgtgacagtcatcccccaggaagatgtggaggcggagagataccggtttctctatcagtatggacacgaaaattcgtaaagtagaggataacccggcgtatttgctcatcgccgcttttatgttcatcaccacttaaacctttgtaccaccctaacaaccaatacaaaaggacttctatggtcatcacaccacagaagtccttttgtatctatttccctttatgaagttcatgtacctgaacatcacccttgcaagccccatttttctcccgtctcacccaatagctgctgatcacaggggactggaaatccagcagaggaatctcccgaagctcctcattcgccacccagggctccgccaacttctggggaaggaagctgtatcccacaccctccagcagatagggcaccagctttgtacaattatcgatttcaaaagaaaactgataatagggcggaaaaagctctcttataaaagcacccactccctgaagcatgaaattacacatcaaataatccacatgtaccaggtcctcttttgccattccatccacataatccacattatcaaaggcagttactaacactagcttttccttatgaaaaacctcacattcaaatccctgtttatacagtggaatatatgaataaaccacatccagtatcccatcctgaagctgtttcaaaagctcctccgaatgtcccagaatgactttcagtgaaatattccgattctttaagcgatattggtaaatacagtctgccagataggattcgtagatggtattcgtagtcccgatcctcaagttcctgtcataatgagacactgcgttcaccttttgaaaggaaagcgcctccagttccatcatacgtttggcgtactccagaaagatctcaccttctgaggtaagctccacctgccgtttttctctggaaaataactgtttacccaattctctttccagctccacgatccggttggtcaccgtagactgggcaacatataactgccgggcagtctgagtaaaattcttcagcttcgctaaggcaaggaatgttctgatattctcggtgtccatagcttccctcctgtgtattctgtatggtttcttattggtttcttattggtttccaattgtttctctattactttttattcgttcctttaagtacaattctattcgattttcaaatcatacccattcaatttattcgttttacagatagtatacgtccaggttatactaatgtcaataaaagacctgattggttttctcaaaaaagggaggtaatttctggtaatgaaaacaaaaaagaaaataatcgagagtactaagaatccgggcctaaagctcgtttatacccagggaaccgacccagactttcaattcctgtgcagccagttagataaaactctggatcaggctattggaggacatgcaaaacgcactaaatttctttcctttaacaaggctgactctatggacctggtagtcctggcctatcgtgaaaaggataaccaaaacttagaggccccctatatgcaaggccgccccacagcctgcggcgcctaccgcatttacgaccctgacaccattgaaataaaacgaatttttgtggcagacgatgcccgaagaaaggggatcggttcgatcatcgtgaacgaattactggcccacggaaaatctcagggcttccaaagggctgtgctggaaactggagagttcctttctgcctccgtcaagctctatgaacgtatgggcttttacagaatccccaattatccaccctatgaaaatattacggaatccttgtgtatggaggctatgctgcattccatcgctggtccatcttgttcactgtaaacagagacatttagtggatagattctatgatttccggcgcccttatgtcaatctcacaacaaagaaatagcatcctctaccgtggtttttggggcataataaaatctgaaatgtatcaactgtacgaaatcacagatgaagcttttttaaggcatgcaataaatgattatatacgattttattccacagaacgcccacaagatagatataattgtaaaacgctattagaagtaagaaatgaaacgctacatgcggaaagagttcaggaatatccgattgctcagaataatcgtattgagaaatataaagaaaaatggtgtgcatagaaaacgaccacacaagtctgtgtgatcgttcatctgcacttattttagatatttaacctggctacttgacagggggcatatcatgcaaagtttagaatgctatttctatagttaacgatactgagggcgtcagattttgtatctgagtcccttctaacttgattctacatagggcacttgatttttttcaagcgccttttcaaacatcatgggattatgccgtatggtaggcaagcttatacaaaaccttgttctgccaattttatcagataccgctttatctatctctgcactctggctcctgcaccgcccataatggcttccacttcttttttacttgccatggtggtatctccaggggtggtcatggccagtgctccatgtgctgcaccatagttgacagccatctgtgcgtcaccggtggtcatcaggccataaatcaatccggacgcaaaggaatcccctccgcccacacggtccataatctccagtcccttgaaatccatagacttataaatttctccatccgcccagcaaatagcactccagtcattgaccgtagccgtcttcacctgccttaaggtagtggccaccaccttaaagtttggataggtgtgtgccgcttcattgatcatctccttgtatccgtcaaggttcaaggtcttcaaattctcgtcattgcctttaattttaaagccaagacaagcggtaaagtcctcttcatttccaatcatcacgtccacatagtttgcgatttccttattgatctcctgggccttttcctgaccgccgatggctgaccacatggatggacggtaattcaaatcataagagaccactgttccgtatttcttagcagtcttaatggcagccagcactgtctcacaggactgttgagaaagggctgcataaattccgcctgtatgaagccagcgcacccctaattcgccaaaaatataatcaaagtcaaaatcctcaggtgttgccttggagatggccgtattcccacggtcagaacagcctacggcgccccggatgccaaatccacgctctgtaaaattcagaccgttcctgcagatacgtccgattccatcagtcttcatccacttgatcaaggaggtgtccaccccgccctgcataataaaatcttccatgagcatcccaatctcattatctgcaaatgcggtaataactcccgtattcatacgaaaacacttccgcagcccccggatcacattgtactctcctccgccttcccaggcccgaaaagaccgggctgtacggattctgccttctcctggatccaggcggagcatcacctctcccaaggacaccgcatcatatttacactcattggctggtcttaaatttaaattcataacccttcctcctgaaatcttctttaggcaaaacgaatggacttcacctgagctaccgcttcttttgtcaattcaagaatcttgtcaaaggcgccttcacggatcaaatccccttttaccatccagcttccgccgcagcatagaattttatcacaagacaggtagctttccaaattttttacatttacaccgccggtgggcataaatttcaccgttccatatggtgcggccagtgccttgatggttcccactcccccatactgctctgccgggaagaacttcaccaccttcagcccccgttttactgcctgagccacctcggacggagtaacacagccaggaaatacagggatattttcagataaacagtaatccacgatctctgggtcaaagcctggactcacaatgaatttcgcccctgcattcaccgcacgttgaatctgatcgaccgtaaggactgtccctgcacccacaagcatttctgggtaagcctggcacatccggcggattgactcctccgctgcctctgtgcggaaggtcacctccgcacagggcagaccgccctcacacaacgccttcccaaggggaagtgcatcctttgcatcatctaacacgactaccggtaccagaccataatcagaaaatttttgttccatagtactcatatcacttttcctcgcctttcgctgaaatcacagacaggacttcattacctgataagtgccgttcttgtgaatttcctccagatatccaacaaccgcatcctcaaagccctctatcttggttaaatcctctccccaaaaggaggtatttgtacaaactgcatgcacaagttcatctgcagaatcatccttatgagccgcataaaattctaaaacctctcggtcatcatgaattgtatattcattggttcctctgctgcctaccaggccctcatccgtgagggtcttcccattataaaaagcaatatagaaggcaaaggatgccacaatacatttgggcagcttctgatatttttccatataccccttaagactgggcatgacacgtacctgccatttagaggtggaattcaaagcaatagacaataaggcatggtccacaaatggattattaaagcggtccgtgacagaagcggcaaattccttcagctcctcctcgggcagagtcaaagtaggtatgatctcatcataaatggtcttattcataaagccccggatcacctcatccgtcatacaattgcggacaatatcctgacccgcaaggtacgctcccagcaccatggaggtatgggcgccatttaagatccgcacctttctctgtttataaggcttatggtcatcacagattatcaccggaagccccgccttctcaaagggcagctcctccttcacccactgaggcgcttcaataacccacaggccaaagatctccccaatatccagcagattatcctgataccccagctcctggcagatggcatcagcgtcatttctgggatagcctggcacaatacggtctactaaagttgagcagaatacattttcttccttaagccaggtcttaaattcctcacttaattcccactgtgaggcatactgcataacacagttttccaattccttgccgttattgtcaatcagttcacaggaaagaataatcaacccttttcctttttccttgccaaaagcctgataacgacgatagagaaactgtgtcagcttacctggataactggaagccggcgcatcttcaaaggcacaggacggatcgtagacgatcccagcttctgtagtattgcacacaataaaacgcagctccggactatcggcataggacaaaacagcctcataatccttataagggttcaaacatttgctcacacaggaaatcactcgtcggtcatctacctttttgccatcctcattcccccgcaaaatcagcgtatacaaaccttcctgctcattgatcatatctgcaagacctggtgcgatgggctgacacagaacgacctttgagttaaatccagcattctcattcatcttgtcaatccaacattctacaaaggcccgcaggaagtttccttcgccaaattggagcactcgctcaggtgcatcttttaataaataaccctgataccctatttcctccagtgttttataacttaattttttcattctatcattcctcctgctatttgctcagagtgtcacaccctgcttaaaaatcgccatatcatggaatcctttttcttctgcttttaccttccggccagacgctacctccagcacataaccaaacaattctgcccccatgtcatccagagaggcatcctccaccagaacaccgcagttaaagtcgatccaattgttttttttctgggagagatctgtgttggtggaaatttttacggtgggcaccggacatgcaaagggcgtgccccttccagtggtaaacagaacaatgtgagctccgctggcagccagcgccgttgatgccacaagatcatttcccggggcgctgagcagattcaaaccctttgtgtataccggttcgccatatttcagcaccccccgcacaggcgcactccctgacttttgtgtacagcccagagacttgtcctctaatgttgtaatgccgcctttcttattccccggcgatggattttcataaattgtctgattgtgagaggtaaaataatttttaaaatcattaatcaatgccaccgtcttttcaaaaagttccggtgtctcacagcggttcatcagcagggtctctgccccaaacatttccggcacttccgtaagtatggtggttccgcctttggagattaaaatatcagaaaaacgtcccactgtgggattcgccgttataccggacaagccgtcggatccgccacatttcattcctataataagttcacttgcaggaattggttccctcttaaaacttcccacatattctgccagctcactgatcaaggcaagagcttcttcaatctcatccgagcactcctgtgccacaagaaatttcactcttttttcgtcatagtccccgataaattttttcaattcatcaatgctgctgttttcacagccaagtcccagaaccaaaacccctcctgcatttggatggttcacaaggtctgcaagaatccgtcttgtattgtcctgatcatcgcccatctgggaacagccatatggatgggtaaaagctaccacttcttccacagtgccgcccacatacctttgggcttgtttttcgattgcctgggccacattgtttacgcagcccacggtagggatgatccagatttcattgcgcacccccacttttttatccggtctgcggtatccctggaaataaacgtcctgtgttttctccatgtgtgtatcctgcttatgataggaataatccaacagctggccaaggccagtttttacattatgaatatgtacccaggaaccttttcttatggtttccttggcaatgccaatggagcagccatacttcatgacctggcttccctgactgatctcatacaatgcaaacttatgcccctgggggatgtcctcttcaagcttcacctgaatctcgtccacagtcagtattgttcctgccgcaagaggttttaaggcaactgcaactgtatcatttggatgaatcctgataaaatccttcatatttatcctccagttctagtaaaacagatttacaagcgcagtagtacagaacggcacataggtaagcagcattaagtcaataaacaacagaatatagaaggggactgcttccttgataaagtcctttgtcttacatttggtaataccgcaggtgacaaacataagtgtacccatgggcggtgaaaatgctcctatggcattattgaagatatataccatggcaaactgtatttcattgatcccgtagctttttgcaataggtgccaaaagaggaacgagaatgatcatagaagcgtttccttcaataaacatacccacgatcagcaggaaaatatttacaacaataaggaataaatacttgctatgaatcgtggtcatcatccactcagtgagctgctgtggaatgcgctccttcgtaagaatccatgaaaagactgcagcagcggcaacgataagcataatggaagcggttgtggtaactgtctccttaaaggcggttgccatatccttggccttcagctcacgataaataagtcccagaagcgcagcataaacaatcgctaccgctcctgcctccgttgcggtaaaaatgccaagacggatacctccgatgataataatgggcaggagaaggggcagtattgcaggtttcgctgccgttgcaaattctttacccgtaatcttctcagtacgaagaggcacgtatcctctctttttggaaataaagctggcaagaagcatttcagaaatacagagaatggcacccacaccaatacctgagataaacagctttccgatggatacattggcaatacagccatacaggatcattgcaattcccggagggatcaagggggtgatcatggatgaagctgccgttactactgtagaaaaggccttagagaagccctttttctccatttccggaaccatcatctttgcttccatggctgcatctgcaatattcgaaccagacaatccgcccataagagtagacagcaggatatttacctgggccagaccgccggacatacggccggtgagtactgagcagaaatccataatacgtctggtcacgccagtatagttcataacaatacccgcacatacgaaaaatggaattgccagcagagaaatactctccacacctgttatagcctgctgcgcaaatataatgggatttgcacttggattcataacaaagtaaactgcagagcctcccaaaaccgcaatataaaccggcgctttcagaaagagcagcgccagcattactactgccgaaagaacaatcacatgtgtcatgcttcctctcctcctttctgacttttatcaatatacttattataaaaatagcttacgatcatcaatacatacgacactggagcaatggcgtactgaaaagccagcggaatcttcagcatactagtacttctgccgcttttcaaaaacatctggataaagccgatgctgttataaaacagataggcaattaccaaaaacaccacaacatcaataagatatccgatgattttctgcataccttggggaagtgcatcaaccaccatctcaatggcaacatggctgcctgtacggaaggcggctccccctgctgcaaaaacaatccataccatacagaaaatctgtacttcctcaagccaggtatatggcttacccacaatgtaccgcatgatcactccggaaaatgtgagcacgatgagcacaaccaatgcaatactggctactgcaatatccagattgccgataatccttttaacaacactgtgtttctccatctgaactcctctcctttctcaaacttcccggaatttaatgcccctcatttacaacattcctgcctctgcagtcatttccgggtatagtcagggcggctggttgtgattggaccttcttcccaccttcagccgccctgatccatgttttctattactttaatcttacagcaaattctgcagatcgctcacagaagttctacttattctgcacccattgccgcacgaacggtatcatacagaccttcagaccagccaaaggtatcaccctcctcatagaaggcctgtgctttttctttgaagccagccagggtttcttcggtcatctctgtgacagtgacgccctcatctttcattttctggagatattcttcctctgaagcatccacaagttcattattgtatagaccagcttcctcgcctgtggaaaccagcagctcctgctgttcaggggtaaggctgttgaacagatccgcactcataacccatgtggtaaagtttttcacatggccgtcaagaaggagatatttggcaacctcgtgaagctttcttccatataaggtggctaatggattctctgcgccgtcaatggtacctgtctgaagagcctggtaaacctcatccagagccatgcccgtagaagttgcgcctaaaacatcgaatccaatggactgaatctgattgctgggcacacggatcttcagacctgacagatcatccactgtagtaacctgttttgttgtcagtgtatggcgctcaccatatttccagttggaggttaccagcttcagtcccttttcttcaagaagggcacattgatctgcataccagtcgctctctgtaagggtccagcactgatcccagtcatcgaataaaaacggtccgaacacaattccgaaatccggcacaccataatccgcataaaatgcaccgtccgccaaggtgatgtatggctcacccagggtcatgccgtcaatcagctcattctttgctccaagctggctgtccgggaaaagttccagcttcaggctgccatcacctttttcttccacaagctgctgccatttttccaatgcctgtccaatgggctcggacatagaattttcaaatccgatctgaagaactacctccgcgtctgctgctgaaacactctgtgtgatgctcattgctgccagagctgccattgctaataacattttacctttcattctttttctccttttctttttatttacgcctccgctctaggggagttacgcttcatggttatattgctcctattgagggtctgcaaagtggataaccaccttcagcttaccgcctccgaatttactaaattcctcaaaggcagcgcctgcctcatccattgtgtactctgaacgcttttccggctgtgtactgtctgggttcatcacaattttttcaagatctacaccgcctgccttaacaagatcgatcaattccaggaagtccttcttaagtgcatttcttgagccgaaaatatccagttccttcttctgaatcatggtgaagttaaaatccaggtttttctttcctactccgattaaaaccactcgtgcgccaaaggcagcggcatcaatgcagttctggaaagtggaaggaaggccgacggcttcaatggttacatcaaatccatggttcctgcctgtaatttcatttaccttatccataaatgtgtccggatcatcattgagtatcataccagccaggccaaaggtctcatatgcatacttcagcttagtctccgccacgtctgcaatgtatacttgaccgccctgtgcttttgccgcaattgctgccagcacgccaatggttcccgctcccactaccaggaccttgtctccaggctgtacatttgctctggacactccgtgatagctgatacaaaacggttcgatcaaggccagctgctttggtgacaatccctttccatcatagaggcgttccaccggcatggtgatgtactcagaaaatgccccatccctttgggcgcccaaggtttcatttgattcacagcagttaaccatgccccgctcacaggaataacactgggtgcagttaaaatatggattacaggttacaatatcccccttctttaatcccttgctgttttcaccaatttctataatctgtgcagaaaattcatgtcctgggattctgggatatgttgtatacgcaaaagttcccctgtaagttcccaaatcactgccgcagataccaccatacaaaaccttcagaagggcttcaccttcctttggtgttggaacagggttttctacaatctctaccttacctggctctggaatcagtattgtcttcattcttctcctcctttgactgtttttctcatctgttgtatacaacatagtcctttttgtttaatctgtcaatagcttccctgtattttttacatttaatggttattatctctattttgtacaattttgtactgtgttttttgtgctatatttatatattctttcttcgtctttctcttcttgttttactattttcccctttgttttgttatttttttcactataatcgagaattttacggttgttgtatacaattaattcttacatttcactaatctagagacgcacatataggggcgtattcctcatttgacttttttatacaaagaaacctgtttttcaataaaagtaatttcgtagcattctttaaaggtatttatcgtaataaactttttctttcccctcctatattgtatacattaatcctttttgcggcagttatcaggctgtaaatgaccaatttcaatcaataaattcgtgtgttaatatacgttattaccaattattgtgtactatatttatgaatatataacaatttttctttttttattcaaaaaccattgtgttttttgactaaaagtcatatgatgtatacaataaatgtgcgcgcattatttttacagtggaaggaggtacaaaaaaagcatcacggaaacgttctcaccagccaaagcttgaacattccatgatgcctctcatctaacatttgtattgtatcatatttttttagtattttcaagattcagccaaaacaaacaaatcttccccttatacaaatgcagaaataaagcaggtacatcctgccccaagatcgtatttgtatacctaattggccgcataagcaccattaccaatacgcactcctacttggggaagattatcttaaagccgaaattaaaatctataaaaaaactctaaaattaaaaaggataaggagaattactatgttaaataaaaaatctgcattattagcgggaatgcttctcgccctttccctgagcgtatccgtacaggctgaggatttcactccaggcgttactgtcacagaagatgatcagtccgccaccggctacacagctacttttgtgtttgaagattcagatgccgaatccgtaaaattatctggaagcttcggcttttataatgacggcgaaaccaaaggggttgaaccagagaatcccatcgccccctacgattggaaggacggcatgtttgcccttgggcaggagacctattccgaggaaatgacccgggtggacggcactgattactggactctctccatgccactgcccagcggccattatcagtactgcttctatgtagacggctctgaagatcgagtggatgaccctgttaaccctgctccaaaatcccaggtagaaaacggcggcgcctataccaggagtgtgtttgacgttccctatgattccgaaaagcagcccaactctcaggactatgcctttgccgcaaaacgcgaggacgaacagaccggtgaagtgagctatgtggcatacaacgactatgaaggaacctcccgttctctcggcatttatctgccctacggttatgatgaacagcgcgaagaaccatataaagtattatacctgagccatggagccaatggagatgaaaccttctggttcggcggcggcgcagcagcagaaatttttgacaatttaatcgcagaaggcaaactggaaccaacaattattgtcaccatgaacaacgaggcctacgaatggaatttcgagaacatcatcaacaatttgaccaataatattataccctttgtagaaaaaacttatcatgtaggtactacacctgctgacagagcaatggccggtctctccatgggcggaagaactacctgtaatgttttatatacaaacgcagatttgttcagctattttggaatcttcagcggcgcagactcaagcattgattttgcgacccttgatctggaagctatgaaacagcccaaaattatggtaggcgcaggatgctacgactttggattagtcagcgaaaaaactggcaccgccgaagatacttttaccattaccagcttaaaaactctgctggatgaaaacgagatcacttatggatggcacgaagtaaacggaggacatgaatggtttagctggatgcagcttctgcaaatctttggtgaggaatatctttggaaataagttataggtaatatttcattcaccgtttatctagttgaattaactgtttcaaataggatatgctcctttctaggatacaagatcgctgttcagtgcttgttactagaaaggagtatttttcgtctttgatagaaaatggaaaatattggtacttatttcgctagatacattgttcacttgcatcttttctgctataatatccaggcatacatgcccgatccttcgtctctgttttattattagggcttattaatgatgactgcgaggaaaaaacatgggaaaagaacccttaaagcaccaggcataccagatgatcaaagacaatatcattaactgcgtctatgccccgggagctattataaacgaagaaatgatacgcacggagattcctgccagccgcacccctatcagggatgcgctcagtcgtttggagcaggaaggacttataaagatccttcccaaaaaaggaattgccatctccaacataactgtccgggagctgaatatgctctacgaatcaagaaatctcattgagccatatgtggtccgtcactatggaaaccgcatacctcaggacacctatatgaactattacagaaaatatcagaattacctggatggaatactcacagagtactcctttgccgaaatggatgaccgttttcatcaggcctttatagatgctgctgataactcctacttcagcaatttgtactccaccattgaaagccagatccttagaacccgggtaatttcaggacgcacctccaacgaccgtctgctgcagaccgtccaggaacacgtggctattgttgaggctgccctgaaggatgactggaaaggggcagccgctgctatgcagaaccatctcctgatgtccaaaaatgccatctttaattatatccttaaaagtgaaaagtaaaatgccctctgccggatgggcaaacctactctatttacctcattttgcccaaaagcccagacacaagcatttttctgctcctgtctgggctttttaattttcttagcaatccgacttcacaatctcctccgccgtctcctcatccgtgatcataatattcacaacccctccccgcatggcggcggcaatggctttcaccttctctgggccaaatgcagctccaatcctggtgggtatcctgaggaaatccacaacggtggctcccaccacccgggaagagatctcctctgcacagaagtcccccttgtcattataaaagtggaacatcacatcccccacagccttttcttccagaccccggaacagatcctgctggaattccatactgtttacggtttttgacacaaaggaggggattccgatccccacaacggcaatctcggccctgcagatgcttttataggtatttaccatattgaaatcgttcaaaaataaatcccgcttttccggggaattaacaatgcccggaacggccagatacatcggattggcattgagcttttccgcccatttctgtacaacagacagactggggatactgtccccgtaaatccctgtaagctgggatatgttcagcttctcatgctgttcctgactatgaaaataattggcgatcatattcatggtactgccgcctgacaaagcaatatcaccgctggtaggaagaatgtcctcaatatacttagcgcctacattatacactgcgtttggctctgtattcctggccacaacaacatccttcattttatacttatttcccagagcagtttccagttcattatttctcaaatcgtcataagggcttctgatgtaaatctgtataatcccaagctctcttccttctgataacagacggatcacagatgtcctgctgatgccaagcttatctgcaatattctgctgattcatctgtaaaatgtagtacatttttccaatcttttctattaaagaatagtttggtgattttgcatttctcatagacgcaccctcaatttattaattttctaatatatttccacttctcataatagtcccaaataactgaactcttttcaggcttatattccctttgtactgtcaaaggaaccggagcaagccctaacgcctcgctgcataaacgcatacacccctgtagagatgcctgttcatagccttgaaccagcactaatttttttccagtgagattgcacagcagccggcacaagacctctgactgaaaaccacccccgcatcccataagaaaatccggactctcaggtatcaacgtacacaaatttttatactcctcatatatggaacacacaatatcccccatacaggcaaaagcaaaatcataactgtcgcagcctgcatccaaaggagcctgcatataaaagcctccctggctcagagacttgttctctgaaaaaataagagttccaaaggatgccacacaccggaccctgtccttttcagtcatccgtctgtccaattcctcataagtaacgaaaggaaataacaactttttcagcctctgataattaagaccactcactcctgcattggtctccacctgatatgtaccctttttcagatagcagtctgtccagcaccgctgcttttcgtcataaaatttttcccggcacacggttacaatgggagacgttgttccggaaaccaccacgatctccccgtgctcaccctgaattccttttaccgccgtctgcgtatccgcccctccggcaagaaaaacagttttctgagtcaaacccacacgctgtcctgtctcccggcaaattggtcccacacacgctccggcttgtaccacttccggtaaaattccaggatcaacggaaaaccggcggcataattcctgggaccaccggtgggtcccgatattatacagctgggtctcgcaggcctgggtttcctccatcaccagtctgcccgtaaacaaatatcccacccattcactgagactggtaattccggcaattttctcataaatttccgggtgtatccggctgagaccagccagctttaaggcggaaaataccgggcttacccatcgccctgtctttctgtaaatatccgcctgttccggtatttcctccatccaggcggctccccggttatcaatattgggcaggccgtaaaaagcctttccctgactgtccaagagcacgatcgtctccctggcgctggctgctgttactgccgcaacctgcacttccggaaaagaatccaagagctgctttgtacaggataaaagtttctcctcccactcctgcggaagaaaatattgggcatccttgtaggcgaaatcccggtaatatacattttcaaacgtgcggattcccaagatctctcccttgctgctcacaagagcggccctggaattccctgttcctatatcaaaaatcaagtataccttatccatatctgaaatacctcccaaatatgggcgtactccttaatactttaaggtttctaggaaaatagtaccattacgcccattttttgtcaattcgtggattgtctgcactgctgaccacaggggcagtgctgttgttcactgggtgccctgtagtagaatttgccatgtgcaaaaaatatctttaaaaggctgcctccaagagacagcccattctccggtatctgccggagtcaataacagctattgagtacctgatataaaacttcttcctggaatacataggtttccgggctctccaatactccctttacaatatccgggatcatctctttggtgactccaagctcccttagggtggaaggcagtccccactgacggaactttttctttaatgcgtcaattcctgcctgcccatattcctgatcggtcatgccttcttttctctccaaatggaataccctctctgtaaactgaataaacttttccgggttctgggcatttacataggacagccaggcaggattgatcactgcaagcccctccccatgggaagaatctgtgagagcaccaactgcatgctgaatccagtgggccggaaatcctgcattggaacggccgcagtcctgcagaccgttcatggccaagatggcagcccagctgatcgcacttcgggcttccaaatcctggggattatccaaaacccgttcattttccaagaccgtcatgatgattccctctccaatccggtcagagaccggattattcggaactccgtcaaaatatccttcaatcacatgagagatggtatctgccatgcctgctgccgtgagccttctgggaactgtggtgagcagcttgggatcgataatggcggttttaggaaacccatgtgggtcgtgaagggcccatttctgccattttcctgcatccttgccctcatcccttgtaactaccacatggcagcttgtctctgcgccggtagctgatatggtggagactgccaccaccggaagtgcatccttcaccgtgcgctctcttttccaaaaatcccatacatccccatcgtacaaagctccgatcgctatggccttcgccccatcaatggcacttcctcctccaaccgccactaccacatccacatcattttcctttgcataaaggattccttcccgaatcttggacagcttgggattgcttgtgatatattggaggatgcttacttgaataccttcttttttcatggaggcttccccagcggcatagactcccatttcctctaaaggcccctcctgcttaactaaaagggcatggttcccccactttttcacttcttttcccaactgctgaaaggcatctcggccaaacaccacttttgtaggtgcatagtactcaaaattattcatgcgtctcccccctgttagctggatttccacccgcctggcagttcccattgttgcaggttccacggatggcgatcaattcatccaccttttcctgggacagcatctttgctcgcttcttatgtccgatcacctgctgatggatctttgcatagtgctccaatgcctccatccgataatatgcctgatatatatcagccccccaggttaacgccccatgatgggccagcagcacacagtagtaatccttacagaagggcgccacagaatccggtacctcctgagatccgggcgttgcatattgtgccacgggaactactcccagctggatgatggattctgcgaaaataggctgatccagccactctccggttatggaataagcggtagccacagggggatgggcatggacgcaggccccaacctggggattttcacaaaatacccgcaggtgcatcttcacctctgaggagggcctgcaggttccctccagcacatttccctggagatccagttttaccagcatatcaggagtcatataccctttgctcactcctgtgggtgtggcccaaatggaatcctctcctaccttgatggtgatatttccatcattcgcggccacaagacctttatcaaaaattcgtcttccaatatcacaaattagtttctttgcctcttcatctgtgggataattattcatgcttctactccttctgcttttattttttcttatttgttctggtactaagaacatttctttcatacgcatcaatggccaggatgataagaatgatccctccccttaccacactctgccaataaaattgaattccaatcaagttcagtccgtttgtcataaatccaaaaaacaaaacccccgccagcatcccgggaatattggcaaatccccgtttatgcattgtacttccgataaacacagtccctatggcatccagaagataatatcttccgttcactgggatataggaagacaaaaccgagcttccgataactcctcccaaggcgcagcacattccactgacaacaaaggctgccgtcacgcatttccaggcagaaacgccggccaaaactgaggcctctctctgaagtcctgcagcatacagatgtcttcctaaaactgtctttttcagcacaaaatgggctataaaggtgatcaacagggccagtatgatagagaactttatggtaatgtttccccctgtctccctttctatatccaggatcgttccgcatccaatatcccggaagggtcctgtcacattagatagatagatcggagtcccgccttttgtaataatacgctcaatgctctccccgataaataaggttcccaaggtggtcagccatacagagatatgtacctttaatataagaaagctgttgatcagtccaaaaatccctcccgccagcagggctaccccaaaagcagccaggtgatccatccctgcctggatacataagaccgccaccattcccccaatgccataggctgcagccacactcaaatctgttcctccgctgatcaccacaaagcacattcccacagataccagcagcaatactgaggactggtttaacacggaagttatattgctgatactcaaaaaacccggagccgtcaccgcaaaaaacaggaaaatcagcaaaagcaggaaaatggtggagtgatccataagcgttctttttatttttgatgccgtaattttcttttccatcatgccgacctccttttctggattgtggttatagataccgttacaaggattaaggcgcctttaatagcatatacccaataggagggaacattgatcagtgtaaatccattggtcaaaacacctacgaacaaagctgccacaaaagttcctgggatattcgggcggtatcttctggaaaaaacagctcccatatagcttaccagcattacatcaaacagcatcagatccccggctcctggagtatagctgtgcagcctggccaccataagcacagagctgatcactgccataacccctgccagaagatatgtactggccaccatccagggcacattgatcccatttgcctttgcggccagctcactgccgcctatggcactagcatggtttccataggagcatacattaaatagaacatatacaactatggttacaagaatcaaaacccaggtcatagcagggaggaaaagaaagctgtcactggagatatgttccagaagcggatgggctgcaggaaccactacattattggtgatgatcttctccactccctggagaatgtacatcatgcagatggtactcagcaagggaaccatcttcagctttactatggtaaaagcattcactgcctcaatgagcaggcttgccagaagagcggcaaaaacagccaggatcaagggttttcccttggtaagcataactgcaatgatggaaccgctcaccgccatgttcagagtaatggacaaatccgtgcctccccggatcacatggtctcccccggcaataaatatcccggtaagtccaaaggatacaatgcctaacaccgccgactgtgataaaatattggcaatattagagggatgaaggaagataggcgcctttgcggcaaagaatgccatcactgccgcaaaagcaatatagccgctgtaccgcataaaataaacagtcacattctttttcttattttccacggtctgcccctcctcccatggatgccacaatgattttatctgtaacatcctgatcctttgtgtccatttccagcttcacctcaccacggtacataacaatcacccgatccgacattccgtataattcctgtatatcctgagtgatcataagaactcccgctccccttcgggcaacctggtcaataatagaataaatttctgccctggccccaatatcaattcctgaagtgggctgatttaatatgtacagctctgaatcatcgctaagccaccttgccaggaccaccttctgttgattgccgccgcttaaaaggcctgcctgaacatttcctcctggtgtcttaattcgaagctgcgttatttgctcctggacacattgttcctccgctttatctgaaatcaccccatattttgtcattctgcgaatacaggacagagtgatgttttcctttaccgtcatgttctgaatggctcctaatcccctgcggtcatccgggacataactcatcttctctttcaccgccttttccggtgtgagatacgacatttttctgcctttaaattcaatctctcctgaggaaatttgagaatggtccagaatgctcagccccactttgtcatggccggaacccataagtccggtaatccctaagatttctcccctgtgaatctcaaagcttaaatcatgaaattcttttttatggctgagatgcttcacagataaaatcgtctctcccagggtgcgttcctttgcaggatactgttccagaatatttcgtcccaccatcatagtcaccagggaatcaatggtcacatcctttgcatttaccgtatctattttttctccgttcctcagaaccgttacccggtcacagagctgcaggatttctccgaaataatgggagatataaatgacgcccttgtccttttttaattgatcaatgatctgaaacagccggtctgcctctttttttgccagtaccgcagtgggctcatcgaaaacgatcacctttggattggtcatcagtgccctgcagatttggatcaactgctgctcccccacggtcagctcactgaccagcgaacttcccgagagctttactcccaccttttcctcaagcatctgctctgcaagcctgatcatttccctgcgcctcataaaacgaaacaccgatctggtgtgctctgctcctaaaaacagcatttccgccactgtcaaatggggcaccacgtatcgttcctgatgaataaagctgattccaatctgttgtgctgtacgggcatttaatttcctggtaatatcttccccgtcaaagataattttcccgccgtcattgctgtacaggccggccagaatcttcatgatcgttgatttgccggccccgttttcacccacaaggccgtggacttccccggccttgatctggatggtcacgttctgcaaggcttttacaccgggaaattctttgctgatatccagcatttccagtatatattccgattttcccatatggctgcctttcctgatttcccttcgtctttctgctgcttatttggttcccagctccattcccaattccttcagcgcattttcatagttctttttgttcacatatacgggagcggaatatactgttctgggtacggtctctcctgcgagatatctggcacactggtccacagcggcctgtccgatctgatagggattctgggccatgtctccatacatacaagaattttcatctgccacaagctccagaactgtggaagagccatcaacggcatagatcttcacatcgtttctacctgcctctgcgcacgcctgagccacaccgatacacggggtatcccaggccagccagatagcatccacctgatcttcctttgtgagcaggtccagagttttctttctggcatcctcggctgccccggtgatcacatcctggagctctggttctataaactcaatgttgggataatcatttgccacatacttcatcatatcgtaccggatcttacatacacgcacaccggaaaaaccattaaatactgcaatgcgcccttttccgcctaaatcctcgaacatatttctggccagctcttctcccacaagataattgtctgaggtgctgttacagatagaatactcacttaccagatccacggtaaaaagagggatctgcgcgtcactcaccttcttcataaccggctcgtacactgttgcgtctcccagctgcttaataatggcatccggcttctggataatcatattttcaatatcggaaatatgcttctggtcattgcgctccccgtccacggcaatatatttgccgcctagctcttcaattcggtcaatctgtccctggtaagccttcaggtcaaattcatggtcggttcctaaaacggccaccccaatggtttttccctccagtgacggcaccggcataccatccaatacccccatcacaccagtatcttcttgggcatataccaggttctgatcccctagttctcccatgagcggcagagctatggctgccgccgacaaaatagccatgagtttccttgtttttttcttcataagtcttccctccgtttttatatgatttttgcgttcttaaaggtcatttgaccattaattcaatatctgtgggttaaaaattaccttttccagattttccccttttccccatttttctattttgtcacagatgatctgggactgatgatcagtcacctcataagttgccccacaaatatggggtgtataaagtacattctccatatggatcagcctcatctcctcctctttaggcggctcatggtccaatacatccaacacagccccccggatcctgccctcctgaagtgccttttccaaagctccggtatcgatcaccgcagacctggccgtattcacaaacactgcatccttcttcatcctcccaataaggctcccgccaatcattccccttgtgctctcagtcactggaagatggatggataccacatcactgtcctgaaacacctcctccaattcctttttcgtgtaatttttgttgtctgaattcacatatggatcataataggaaatcccacatccaaatgcctctaagataccggcaactgttctccccactgctccaaagcccacaaagcctacctgctttccatagagctcattgcccataaaaatactgtagggcagggtatcctctttccactgaccttccttggcccattgtatggcaggctgtacgtttctatagaaattaatgagaagtcccaccaacagctctgctaccgcctgggcatttctggcaggggtgcacacaatagggatttttcttttattgcaggcttccacctggatatttgctggattggccctacagtctccgataatctgaagactgtcatattcctccaatacctgttctgtgatctcatccaattctgagatcagtgcatctggctgctcctttttcagcagtcccaaaatctcctcctggttatatccagttccctttccatttttcgtccatggataataggcgatttcttgaaagtacttgctcaatcttcctctgtccgcctcatccataggtgctgtcaccaataatttcaactattttccctcctatcttttacttaacatttgtttctatatttaacttttgttctgtattagcctcaatatatcattacttttgttttgtgtcaacacatatgtttaatatttttaaacttatagctattttctgtacatattcacaaaatcttttctatttttttagttctttttccttttgtcaatctattgtgctttgcattatcatttgtttacttttatttttttattatctgaatttataaattacccaaaaagagcggaagagataaccttctctcggttatctcttccgctctttttttacagaaaacttactgcccaagctcccaaaaaagcttcagatattcctcctccacttccttaaaatctctggtctcaaacacaggcatctgctggatctggggctctgtttccatgagccgttcgcccatatagtggtaaaactcataatacaaaagcgtatcatcaattcgctttacctcctgctcttctggcctggtaagagggcttcccagatacttttcatacaccgcccccagcagtttatcctctgctttttggtactgctccagctgcttcttcaccgggcgggtaatatctgccagataggcctctgccccatcatggaggaggcaggccagggccaggcggctgttctttccctctgccaaagcctcctgggcacaatgaatacagtgctgtcccacagaataaaactctggaaaatgtccatttgctctggtcatcatggacagggcatgggcgatatcctttatggaaatatcctcttttcttgggtttaaggggaaaaactgttttttcgtataggtagttatataatcactcattttttccttctccagtcctgcttgcttatgaaattcaatttatgtacttcatctatgaaatccaagttatactattctatttttcaagaccctcgtccgccttatcaggtcatccttattcttcaaagccatggcattttttggcattctcatccacaaattcctggaccatttcctgaagcttatgcattttttcacgggtgtccggatcctgatagggaatcttctccacagttctggccacgtaatcatgctccttaataatggcaaaggtttccgggaaattcacatcaaaaaagtatgccacataggatgcccagaagtccacctttgtccttctgtcccgggacagaacggattctcttctcatacaggcctcccagacctttggagagattttccccttccctgcctcgtgggcagactctcccaaaaatacctcaatggggtcataaagcttcactctgcagttgtccagcttgtccgcatcccggatgagctttgcatgaagcagggtacgctcgtctgtaatcccctccagcttgaaatcgctgtgcttctcaatactgacccggatcagctcgtcccaggtatcctccttgacaaagcgcctaatcattttgtctcctccaaagaggagctgcgccccatatctggcatgatccatggtttccggcataaagctgtcataccttttcaactgctcaaaacgtccgatatcgtgaagaagggcaatgagagcagccagctcccggtcctcctgggacaaccccattcttgttccaatgtcccatgcacaccttaccactccctgggtatgtacgatcttcagcttcaccttatcgtcttccctgtcataattgtccagataagcttcaaattccctgcgggcatgctcaaaattcatagtccttcctcctgtgtatgcattgtattgagatactttagaatctgtacccgtttactcaccaacagggccagggcatccttggccctctttgtgtttttggctgccgcagcgctgcgtatggccgccagctgctttctcactgcctctgcccccagccgggaagcagtctggtccatcctgcgcagattcatcatcacaatctcccattttccatgattcaccgcctggccaagcctcataaaatccatcccctgaataaaccgttccagctcctgaaaatacgtctcttctcctatggtttccatgccccttcgtacatccacacccatgccggaaaggtcctttattctgtcctccaacatgctgattcctccaaatttccatttctgatctctgcttctgttacgtttggaccttcctctcaagcctctgggtccttgctgtcaaaatgagattcctgcaccagcttttccagcttgcacacctttctgtcataggtatatatcccgttcatctcttcctcgatgtccgtaagctgggtatacactcccccggagagtccctctcgttccagctcctttaaacgctcctgaagctttgtaaatttctcctggaattcttcccttgtctttgccatccggtagccgtatacccggttctcacagcacacatggccggggactttccatacgatcccgccgtattccgagatcacggcagccctgccaaaggtgtcctttggaactgtcagctcccggaaataattgtggtcgcttttaaaatctccgcactggaaatcgaaccatccgctggcagaatccacaggtctgcttctatccagctttttcaccatctgggtcacagattctgtggaaaactgtccccagccctcattgaagatcacccagcctgccagggagggcacattaaataaatggtgtatggtctctctgcactcctccagccactccagccggccttcgtggcggagccttcccgttgccttcagggtccatcctctttttcctgtcattttaggaagaatggccggccaggtacagagtctgttcatgtcataggcctctcctccgttgatcatatcctgccacaccagcattcccagcctgtcgcagtgataataccacctgagaggctcaattttgcagtgctttcttaaaagcaaaaagcccaggtttttcatgtttacaatgtccgcctttaacgcctcatcgctgggggctgtatagaggccctccggccaataaccctgatccagaaccccctgaaagaaaaacggtcggtggttgatgcagaatctggctgtcccctgctcatccttttccacagaaaagcagcgcatggcaaagtagctgtccacacaatcctcacccataaggatcttaaggtcatacaggaaaggctcctctggtgtccagtccttccattcttccattctcacccgcagcagcagatatctcccctgcacttttccctctgcctgggccagaacctgcccgttgtccagaatctgtacaacgctttttaatgccggaagatggacactcccccggggatagagatgaatgaccacttcctttttatcatattccggcaaaatctccatgtggtgaatataggtttccggcacccattccagccacacggtctgccagatcccgctttgtgcagtgtaaaacattccggagggctggagtttctgctttcccctggaatgccagcctgtctcgcttttgtctctgcagcacacctggagaaggttttccccctcctttaaatctctggtcacgtcaatggtaaagggcagatagcctccgaaatgtctccctgcctcctccccattccacagcacccggcattcctggtccactgcaccaaaatgaagaaggagacgctggcccggccgttttttgatatttattttccgttcataccacaacacctcctggggagtgagctgcctgcccactccggacaaatgactttccggagaaaagggcactaatattttcccctggagctgtgtatcagcgtaggaatccccaaaggacttccactcttgtgcaggtccaaaacgatactgccaccagccattgaggatctggcagttatcccttctcatctggggacggggatattcgttcagcggcacaaaatcctcctccaaggcctgttcccgcacctgctccccccactgggtaaagagctggtttctctgttcctgcttctgacctaactgaaatgtaaaaatggcatcctttatgcgcatagtcagcctcctgtatgatgtatggattaaaatggacattgttcttctataatttattactgcctgtccctaaaaatgcagacagagagaattttctccttcttcccagaaaagaattatagtttattataatataaaatcttccaaaataacagaccatccttgcgtctggtataaatgcagggatgtgtatccttttaacctgggaagccaaaattccatatcttaatttatacgaaaaataaccggctggagttgtgtatcatttccatccggtcatttattcttttttatttgggacaggtatagcgaggcagtcccttgctgtgttttccgtactcaatggcttggctgggacagcggcagatgcaggccatacaatgtgtacagttcctttcccacacaggctttcccttctccagataaatgttgttcaaaggacacaccttcacacatttcccgcaggaaatacatgcatcagtggcatagaacttcttagcatggacaaacatggggtaaaacagatcattgacaataccgctgttcatcttatcctgaatcccaagggcccgctttggaaagctttctctcttttttataaggcttattatttcatccaagtctttttctgcccggcctatggtttccaacgcctccgcctttgtaggtgtggtaaataatgcaagataattttccggcatcacaacaggaaagcaccccagataattcagattcttggagtcacacaatttcttcaaatatttccctgcgttgccggcgcttcctccgcaggtcatcacaaaatagatctctttacttccggtgagctctgtcttttccagccattcctgaagaattcttgggattctccaggcataggtgggtgcggcaaccacccagggactgtctgagtgcatgttagaaaaatccctggtcctgatcttttcaaatagatttacgacttcctccccggttccctggccgattctcttggcagcatattcgctgtttcccgttcctgaaaaatataaaatcatagtggcagcctccttatatttaaatttcccgttctgcccagggcctgcatccagctctgcccctggaattctcctgagataccctgggctctaaggaccttctttttttaagttgaacttattcatgtgaactcatgaggcggatactttcatagatcagattcaccagatcagcgatctccttccactgggtcccgtccacgcttaaatagtaatagttttttgtcccttcccttcgcatggccacgatcccggactctttgagaatctgcagatgatgagacacggaaggtcttgtcaaatgtgttttttgtgcaatctctcccacccggatccctgtcaggtcgctttccagcagcacaagcaaaatgagctgcctggtctcatcgccaatggcagtaaaagcgtttctgttcttttgaaatccgttgactatcttattcagtcgttcttcacattccattttctcactccattttctacagatatctcacatccaagtttttccgctgtacagaacgaaggaatttcaccttgggataacccaataccagggtcatggcaacacgtttcttttttggtatttttaaagctctcttaatcttaaaggagctgttggctgccattgtgaaaaatccactgtacaatactccaagtccgttggcctctgccacaaactccatgttctgggccgcaagaagaccatttgtcttgtcctgtgccaaaataacgatcactgtgggtgctttgaagaagaaaaagtgatcatctatcttattgtgtcttaccatggggctgaataaacctgcaaaaggctttaatttcctgaacatcccaactgccagcctctccagcttctccttttctctgtcaagaaccacaaaggacacatcctgcatattcttagctgtatgcgtgagccttccagcctctaaaatctgttccaggacctcctggggaattttcttgttctggaactgccggatacttctcctgaaacggataacatccaaaacctcctgtggatttaagcgcacttgtgtatttttctgaatctgctctgtactgtaaccgctgatcacgatggcttccttcgggcagaccgccgtacattgtccgcataagatgcagtcctccatcacggtttttgcctttttatccctcagctcaaggttatgggccgcacatgtccttgcgcataatccacagccaatacatttgtccgtatctattcttacctggtgtttttccatgaccaagctcctccgttcgttaaagtttattaaccattatacaaaacaaaaatcacggatacaacattggtaaagaaatctgataccatcatttttttttaaaaaattagcactctcctcttgacagtgctaataatatatgttatattacgtatagaacaaaggaaagcctttattttccctttgctcccaaccacaaaacacctcggatttttccgatcgtgcagataaacgatcaatcctatgcatgatagaaaggagtaatgacttatgttaatgcctagtatttttggagaaaatttatttgatgactggatggacttcccatttcgtgattctttctttgataagaagaatcccctctttggaaaaagagcagcccgcctcatgagcaccgatgtccgcgaaacagacaagggatatgaactggatattgatctgccaggatttaaaaaagaagaagtccgggcccagctaaaggatggatatttaactatttccgctgccaaagggctgaacaaggatcagaaagaccaggatggcaaatacatccgtcaggagcgctatacaggcagcatgaccagaagcttttatgtaggcgaggagcttaaacaagaagacattcatgcaaaatttgaagacggtattttgaaactgtccattcccaaaacagaagcacctgctgttgagaagaacaatttcatctccattgaaggctgataaaacactcttatagaaatcagcggggcaatgcctgaccatctgtcccgctgtctcctcaaaataaaaaacctgttgcagactgtcatggtttttcaccatgacggtctgtttttttctgccccatcgggaaagtgactaagttacagaaatctatagaattataatctacaataaggacatactaaagaaaaaaggagagataccaatgacaatagaaaatttcaacacccaaaccttccaacaggacgtactgtcctcctcggaaccgatcatgatagacttctgggcaccctggtgcagccactgcagaaacctgaacccagtccttgaggaatatgcttcatccgcaccggtgcgggtgggtaaggtaaatgtagatgaggctcctgagctggccagccagtttaagatcatgaccatccccacagtggcaatattcaaggatggtaagattcaaaataagaaaatcgctccccaggagattgaagatctggaagcaatggttcaataacttatatttccataaaacctcttatatagatcccggtcttcttatgcagaccaagctgtaaccctcccctcatcatcgtcagccagacaagcactgctcatctggctgacgatttttattgttcttttcgcctgctctgaaagtaaatgaaccggtcaatggcatccaggatatcctggaattcttcccttggcgccagctctatatagttagagagcaactcttcctcctggtccttgtatctgccgtaaaaaatatcatacaggttatgtccccggagatatattttaatttcctccatgtgctctttcacatcctccaccgtctccagatccttaccgatcacctggaccagatgacggccgctgcggatcctgtataaatactccttccatttttccagaaagatctggtaaaattcctccggggatttcaagattccaagccgcgtcataatctccgggttgaaaaagtagttttcaaaggaatagtattttaacaccagcacattcttttgtgtcaccctgggcagacggtccacatcctccagattccgctcttcataatacttgcagagctgccttttcagcttctggctgtcctccccgtctccgtcccggatcatgagaaactggtccttcaggtaaatctggttaatgtactttaggttggcataggtcttaatattggtacagctattggtggtaatgatggcaatgcggaaaagctttccctggctgtcataggtctcggaataatatttccggatgagaaggggcagacggcttttatcctgcttgccctccacaataaacacaaagttcacattcatcaggtcattggccgtgtatcccagatcatccaaaatagcgctgatatctgtcttctcccggatctgagaatatccgtcctcccccacgatcatctgccggatctgtctggaattaaaatttggcagaaggttgggagaatgggtggtgaaaaatacctggttcttcttggtgaggccgtgaagaatctctccgcaccgcttctgcatctggggatggaggaaaatctccggctcctccaccaggataagcccagagttgcgctggtttccctgggcacaggcctccagaagggacagcatatacacgctgcgcatgccttttcccatactctcaatgggccttggtgccttctgcctgggatggcaggtctctgccgtaacgctgagcatccgctccacatcccggttcatggagtaaatgatctcttcctggccgccgtttctcttaaaataatagttcacgctcttagaaaaagagtccagattcagttggtacagcttgtaatctaaaagcttggcagcctcaaacacattgatgtcctccggcttcttctggttgatcagtccaatacaggaaaaacaatggttacagatcttcgcctcatcaaatatgcagctgccctgacgcatccttctaagcagatcatcctcctggaccacaagaaggtccttctgaaactgctccaggctgcgctggatatcgatataataaatctgaggaaatacccgctgtatatagtggttgtttttctgaaagccatcgctgaagcgggccttgcccgcccggttggcaatgtaggtgaaggtgaggatcccattttcataggagggcagctttttacaaaaatccagcttccaggaatcgtatcttctataggtgctcacacagccccgctggtggagtattttcaaatccgcctctccaatctccagggatacctgtatctcaatattggggtaatcctcctgaaaatcctccatggtgatctcataggagccgcccacggcccggatggcatccagaaccgctgtttttcctgtgttgtttttacccacaagaatcagggcgttttcaatattctcaatggacatctcctggatggatttaaaattccggattctaagagctgtgatcctcatttgctgcacctccccttttttctcattttatcatattatggggcttcccgccatatttagaaggactcccgggagatcacctccaggaacggttctccgtacttttcatatttatgttcacccacaccggatacggacagcatctcttcttttgtcacaggctttaacatacacatttgaatcagagttttgtcggaaaacacaatatagggaggaaccttttcctttctggcaatttccatacgcagcttgcggagcttttcgaaaagtgactcctcctgcctggtaaactcttgctgggagacggttcctttcttttgcttcttctccttgggtatgcggggctgctctttagccattttcatgaccaggggctggtccccctccaggatttccacggattttgatgtgagctttacaatagcatactcatcctgggtgactgtgagatattctctgagcataagctcattcataagctggcgcagcttatacacaggggtctcggacagggttccgtaataggggttttcgtccatgcggtaattgcggatcttcatggtgtttgccccgcggagagtgtcaatgatcacattggttccgtaccgctggcggctggtcttcacacaggctgccatagacctggccatctgtgtcacatccacggtctcaaactgagtaagacagttggagcagtttccacagtagttggagccgtactctccaaaataccgcaggatataatccctgaggcattcattggtaaagcagtagaaggtcatctttttcagtctctccctttcccgctcctttagcacctgggcagtctcttcgtccgtgccctcaggggcctccatccggtcaatgaaaaactggttggtgaccacgtcctggccggaatacagaaggagacactcagagggcagtccgtctctcccggctcttcccgcctcctggtaatagctttcaatgttcttgggcatgttgtagtggatcacatagcgcacattggatttatcaatgcccatgccaaaggcattggtggccaccatgatccggttttggtcaaagaggaaggcctcctgattctttctcctctcctcgtcagagagtcccgcatggtatctggtggccaaaaagcctgctttcacaagctggaggcacacctcctccacggtctttctggtaagacagtaaatgatgccgcagtcctgttcatgacttttcacatagtccaaggtggtcttccacttgctcactggctgctgcaccaggaattttaaattcttccggtcaaatccagtggtcacctgaaccgggtccgacatatccagaaggatctgaatatcctcctttacctctttggtggctgtggccgtaaatgcggagatcactggacgccttttcagacagttgataaaatccaggattttcaggtagctgggccggaaatcctggccccactgggaaatacagtgggcttcatccacacttaccatggaaatttccatatcctgtacagcttccagaaagccctctgtaagcagcctttcaggagccacgtatacaattttgtattgtccctggcgcatatttctcattgctgcccggtactggcccggtgtgagggagctgttcagatatgctgcatggattcccgcctgattcagcgttgtgacctggtctttcataagagagatgagaggagagataacgagagtgatcccctgcataagcagggccgggatctggtaacagatggatttgcctgccccggtgggcataatgcccaccgcatcccggccttccaggatgccgtccaccaggagctcctgcccctgacggaaagagtcatagccaaagtacttttttaatgcttcatatttcgtcatagatttctatttgttccctttctaatggtgcataaactatccttctctgggtggtacaatggaaaaccggggctactatgcaaataagagagaacactggtatgtattctgtcttatttctacattttaaaaatatctgcatgggatcccgtatccactagcgtgagggtcaatatatcctgttcgatcagatacacaagaagccagtctggctttatgtgacattcacgaaatccttgaaatttaccgcttaatccatggtcacggtatttctcatgaagttgtctgccctgacgcaatgtatccacaacttcatctagaagagaaagatcaagcccgcgttttctcataagcttgtagctctttttataagcggtggtaaatttaacttggtacatggattattcttccaaagccttcttcagttcttccatactggaatatcccttaatgtcaggatcacgggatatgcctcttgcctcttccatggcatccaatgtcctctggctgtaatggggtagttctacctgaaacggaagtccgccccgcaacacacactggtgaagaaaaagattcacggcactggacatatcgagtcccaggtctctaaacaggtcattggcctgtttttttatgtctgcatcaattctaatttgtgttggagccgtagccatataatcatctcctttcacttatataatagtgtctttggtttacattgtcaatcaaaagaactcttttatgcatattattaagcaaaataacttgctagaagtgaaacctatttctccagcattgaagtaggcgctttcctgtataatattaaaatttgtgtttgtatttattgacaatcatagtgccttttgttacaatgtattttgttctaaatagaacaatattggaggtgacccattatgctaagtgaattctggaacagcctgaatctattgaaaaagctgtacgacaagaccatggaaccggtctgccaggaattccagctcaccagaatggagctggatattctgttatttctggccaacaacccgccctttgacacagcggctgacattatccgcaggcggcggctgaccaaatcccatgtatcctcttccctgaagcttttggaagaaaaaggatatctccagggagaattccatcctggaaaccggaaaaccgttcatctaaggctttgttcccaggcaggcgcacctgtgtccaggggacaggaggcccagaaggaatttgcccaggcaattttccggaattttacggaaaaagaaaaagaagaaatggatgctgccttttttaagatcgcagacaacatccgcttcgcacttttggaggaaggactatgatatttaaattcttgatctgttttgtggccggcattggcgccgggcttggaacaggctttgcgggaatgagcgccgctgctgtgatcagccccatgctcatcacctttttgaaaatacctgcctacgaggccgtggggatcgccttggccagcgacgtgctggcaagtgccgtgagcgcctacacctacggcaaaaataaaaacctggacatcaaaaacggacttgtgatgatgatctccgtcctgtgcttcaccctcttcggaagctgggtctccagcctggttcccagccatgccatgggcggcttctctatgtttatgaccctgctgctgggcattaaattcattgtcaagccagttatgaccaccaaggaagccatgacccaggtaagtccaaagaaacgttttgtccagtctgtgttgtgcggaatgctcattggctttatctgcggctttgtgggtgcaggtggaggtatgatgatgcttctgatcctcaccagtgttcttggctatgaattaaaaaccgctgtgggcaccagtgtgtttatcatggccttcacagcctttaccggctccatgagccattttgccattggcggcgcaccggactggtggtgcctgatcttctgcgttctgtccacccttctgtgggccaggatcgccgccaaattcgccaacaaaagctcacctctggtgctcaacagagccaccggggtcgtgctgaccgttctgggtgtgaccatccttgcagtgaattacctgtgattcaactgcccatcccctcactcataagaggcttggcagctttgtaggctaatgcaaagctgccaagcaaaaaaagaacctgtcccccagtaattaaacattacctaagggtacaggttctttttaccgcacagtctcaggcagatccacaatccacttccctgcctgcctttgctcaaatcctgttatgatagatttccaaagaacttcttaaaggtgtgtttctcctcaatagctgttgtgacctttgccatcttggaggtatcccccagaaggatggccccgcacagacggttatttaagaaataatatttttcatactgcttctttcccatatccttaaattccgctgtcttatataccaggttctgcttctttccattatccccaatggcaaataaagctgtattcataccatggaaggacagtcctgcggatacggttgtataggctgtctgctctcctgccgcattggctccggcggtcttgccctgctccagtgcctgggcccagatggcataattcaccccttcaaattccgcacagtcaccgcaggcatatacctgtggcatagaagtttccatcttctcgtttaccacaacggcccggttgatctccaggcccatgtctttggccaacgctgtgtttggccgcacgcctgcagagatgatcaccagctgtgcagggaaaactcttccgtctgcaagccgtactcctgtcaccttgtcctggccttcaatagcctcaatctgaacgtctgtataaatatcaattccattgctgcgcacaacagattccagcatgtcactggcaggcacatccaactgccgtcccatgatctgaggggcaagctccagaacggtaacctgtagctttgcttttttcagctcccaggctgcctccagtcccagaacaccgcctccgatcacaaccgcatgctgggtgtcaggaagaagcttttcaattttttccacatcgctcatccttcttatggcaataacctgaggctggtcagcgcctggaataggcggaacaaaacactcagagcccagggcatagatcagctttgtgtatttacacttggtgccgtcagaaagctccacctctttctcctttgtatggacggtctttacctctttgcccagaacctggaatatccggttctcttcataccagcctggatcctccacagcgatctctctggcatccagctctgccaccatggattttgtcagcatgggacggttataggtgctgtagggctcattggagatcatcacaatggagccggtcttatctctctcccggatggccttggctgcactgagccctgctgccccgttgcccaggatcacgtaaaattcctgggtgtcattgcgaaaaccagtgtcttcatcctccactggcacaaaattctcttttcccacaccgcacaccgggcagatctccagggaggaatcaaagatttctccgcacaccagacatttcacaagacttcttccgccctttttggtcttcttgggattttctttttccaaaaggaggcagccaaaattgtagccatattcataagcagccaccaactctgcatcgctgggcttaaaccgtacctggaagctgtccaccacccgcatacgcagctgctccagacgctgcatgatgtgaggcacaccctcgccgctccagccatagcttccaaaggcactggccagcttgcctccgtgggttcctgcaaaaattgatgtggtcagatcccagatgggcttcaatgcctctcccacaatggtgggggtaccgaacaaaagaccgtccgcaaagcccatttcctccagaaccttgtctgcatccgcttccaccaggtcatagcagcggacatccacatccccgctgtcctcaatacctctggaaatttccccggccagctccttggtatacccataagcgctcacataaggaatgatcacggtctttcttggattgggatttaccaccgtacaccattcctggtaggtattcagcataaagtccacatccgtgtccagcacaggtccgtgtcccgtgcagatcatgctcaggtcaagctggcgtactctgtccagagcttttaacatataaggcttgaaggggccgatgatgcagtcaaaatagtatttggtggcccgcatataatcctctttgttggtcaccttgcttgccagcacatccttgaacccatagtgggagccaaaggaatcacaggtaaccaagatctgctcctcttcaatataggtgtacatggtatccggccagtgaaggttgggcaccaccaagaagcgcagagttttcccgccgatctccatgcgctggttatcctttactgcaatggacacgaaatctctgtttacgatctctcttaaaaatccaatggcacagcctgtggcgataattttcatctgagggctgagatccagaagcttctccacgctccctgcatggtccggctccgtatggtccaccaccaggtagtcaatcttggtcacatcgatgacttccttcagcttttccagatattcctcccagaatttcaccttggctgtctcaaagagcaccaccttgtcccctgccttccaaacataggaattgtaggtggttccaaactctgtgtacatgataatatcaaacaccttcaaagtgtcatccacaatccctgtccagtaaaaatcttttctcaattcaagactcttcacaattgttcctcccttttttctatcatctctttattcttcctcttggtttccctcatccacccacagcccaggcttccccggcatccgtttctaaattcccggaccattgtgccaaagctcctgtcaggccgtgagataaatgctgaaaaagggcacctcttcgtttccgcaccaatagggcatgtcacaatgggcagccatctctcctgcgtcaatgcaataagcagacagacaggaggccagtttctccggaaatttgcagggttctccctgaatcttggcacactggctgcaaaagctgcagggcccggccatgacagcaagtccctgaacgccccctttttcaaaagcctctaccagttccctggtgatcatattgtgggcctttctggctgtctttgtctggttattgtccatcacgctgtccaccggctgcacggtctgcagaaccaaggcgcgcctgtatctgcgcacacgcgcttccatttcctctgggcttccgcagtctggcggacaggcataattcctgtcataattcccacaggtgttttccacacagtactgacgaagatccggatcgatcaccaaattctccacatccatccacacagcccttgtaaaacctgcctccaatgccatttccatcattttcttctcatccatagttttaccttctttttttctgctattccaacttttacaaagggatactcaatttcttttttaactatatcacagaaaaacctccgggagaatagccccggaggtttttaaggattttttaaggaattattttttctttttttcctgcttcttggaagccaggatctcttccgcgatctccacctcagatttttcatctggaggaagtacaatgttcagaataatggcaaagagtgctgcaggcacaataccggagccgccgaagatcaggttgatgctctcgggaagctgggccagcactgctgtgttggatcccagaccataaccaagacccagagccacagagataatcgtcacgtttcttggagttaccggccacttggtcacaagctggataccgctgaccacgatagatgcaaacatcataaccgccgcaccgcccagaacactctgaggcataatggagatcagggctgccagctttggaaacaggccgcaggcaatgaggaaaataccgccgattccaatggagaaacggtttacaaccttgttcattgccacaaggcccacgttctggctgaaggaggtgttgggcagcacgccgaaaagggctgcaaaggaagagccaagaccatcacacataacaccgcctgacagctccttatccgtagcttctcttccaagtccgccttctgtgataccggagatatctcccacagtttccactgcggtaacaataaacatgatacagatgggaacaatggccttcaggtcaaacacccattttaccggcataatcttgggaatggcaaaccagggagcatctgctaccttggaccagttcaggacccaggcctttgtggcctctacagtggctcctgtagcctcatccacataggtgaaggtggtaggaaggatcattcccataatagccactacaatatatcccacaataataccgataaggatagaagaaaagctggtaaagcctttcgttccatgctttaacacaataattacgatcaacacaatggcgcccaccagaaggttttccaaagagccatagtccttggctgtattgccgcctccaaaggagctgatcccaacggagatcaaagaaagaccgatggataacacaaccgtgccagttaccacagatggaaagaactttctcaacggctttaaaaagcttcccaggacggtctcaaacagtccgccgataaaggatgcagccaagatcgctccatatcccacaacaccgccgcccatggcaatggcaacgctcttgcacacgccgataaaacctgagctggttcccatgacgatgggaagtcttccgccaatggggccaacggtaaatacctgtaccaatgtaacaattcctgctataagcatagcattttgcagcaacgcgatctgcagacttcccccagcctcaatgccgcagatccctgtaatgatcaacaggggagtcaggttgcccacgaacatagccaatacatgctgcagtcccagaggtatcgccagcttcagaggcggctgtccgtccagatcataaggagttgccactttcttttctttgtttcccatactctaatcctccaactaattttttcgggcagaggcctatgcaccgcactttgtcaaaataggcaaaaagcagctccaaccttggatagcaaaaggttaaaactgcttacttcttcccgtatgaatggcttgattataccaaaatctaacaaattttgcaagctaattaaaaaaattttataaaatttctataaaatcgaaggttttttcttctatcagtgcttctccgggaaaggctgccttttttgccttctcttcaaatgcccttcggacattttgtgcttccctgggatttttattaatgaacttttcccaggcatacagcatatggtacttcaccagaggagaggccagcttctccactctccctctggaaaagcccagtgctcccagctcctccagagaacgctctcccttcatcatggcaaacaccgccagctcacaccctgcctcaccaagggcctcaccagcgctggcgcctgccaaaaggatggatctgcagatctcctgggccttgtcaatctgccctgaaccacgaaaatacctggcctggtaaatggcccatcttccctcatagaagtcttcacagcccttctcttcctggacaaaccactgggaagggcagtcctcgtaggtctttccctctgccagcgccttcagcagtttaccggttttccagaaggctgccttcgccccttcatgctccttcaaataaatccttctgctgttgtcaccaagggccaaatccttggagggcgctaaatggaaagccccataggccgccccgaaaattccctgaaccttcaggaagcttcccgtcataccctctccccccaggagacctcctgccgcaaaaagcaacaggccaagcccgaggctggccgccggacctcccagaaaatacttgtccaggtccatgtcctcaaacctgcaggccctggaagccggaacaaattctacggtaaatctccagggaccataaaagcggctgcagattttcccctgccttttataaaaatacagatttcctatacggaaataggcgctgtcgaacccagaggcccatgctccagccagatgccccagctcgtggaaagtaaactggaaaaacaaacccagaaaacatatgagaataaataaaatcgaattcaatgtgcaaatgctcctttttgtgatatcaggacccattatacgggaaaactgccttttttaccagggtaatttcagattctcccgccgaatcactctctttttggacccgcccaattttttccatataaaaatcacagctttcttgaagtttccaaatatggtatccttatccttgaaaggtgttggactttatagttctataatagatcccaccaaactcttaacacacaacagagaaacaccatcaggaggattcttatgaaaaaacattgggggcttttcctggcccttcttattacactgctgctgacaggaaccttttccgtccaggctgcccagtatgccaccaaggaaaaggcggaggtaagtcttacctccaaccgggcaggatggcacaagattaacggaaaatattattattataaccaggaaaaacggctcatgtgcggccagattctctacaaagggaactattactactgcacctccaacggcgcccgctataccggatgggtgaaataccgcagcaaaaaggcctattttggtcctgcaaaatacaggagccgctggctctaccagcccaaggtaaaccggcgctactgctttgatccatatggatacatgatcacgggacggtgggtgacctaccgaaatcacaggtattatctctccccccagggcccggccctgaccaaccagtggctcactcaaaacgggcagaaatattactttcgctccaacgctgtcatggccaccggctggcagaaaatcggcaattataaatattatttttacaaaaacggccgcctggccagaaatacctgggtgggaagcagctatgtagattccgcaggccgtcttcagcccaaaagctacaccagtcccaccggaaaccggctagtctataattcctcctccctccacgtggagctgaaccggaaatccaaaaatgggatctcctactgggtcgcccatatccgtacctcctctccctctcaggtgcgctctgccctgtcctatggaacctatggaggcgcccgccagaccacctccagcgccgtgacctccaacggaggcgtcatcggagtgaacggaagtgcctttgactacaacaccggccgtccctcccctctgggcatgtgtataaaaaacgggcggatctatggagactacatgaccagctacagtgttatggctgtggataaaaagggtctcatgtacactcccaggcagggcttgatgggaaaggaccttctcaaggcaggggtgaaagacacctataacttcggacctgttctcatccagaacggagctgcccagctcccctgggcagaaacctccaaatattatcccagaactgctgtgggtatggtaaagcccaatgaatacgtccttctggtcaccaacaccggaagctacgcaggcttaaatcactgggatatggtcagcgaattccagtcctacaactgccagtatgcctacaatctggacggcggcggctcctccacccttgtttttcgtggaaaagtcatgaaccgcctcatcggcggcacccagcggccctgcggagattttctgtattttaccaattaatacagaaaaagaatgctccctcctctgtacagcggccccatgctgcgaagcatctctctggttttctcctgagcataccatccgtaaacagaaatgtctgctcatgattttggaaaagccaccgtgatctgggttccctggtccggctggctttccagctccagacagcccttcaggaacgtgaccccatgctttacaatagacagtcccagcccggtaccaccgatttccttggagtggctcttatctactctgtagaagcgctcaaacacccttgcctgatcctttggaggaatcccgattccggtatccttcacccggatccatacctcctgggctgtctcctccaaaatgaccgtcacacttccgtccttccggttatatttaatggcattgtcacagaggttgctgatgatctcctccaaaatagttctcacggtgtaaaggatcacccgctcaccctcaatataaagatggacctgccttctgtgtgcggcttcctcaagtccctgaaaaatatttctgcacagctggtacaggtccacacgctcccattcatagggaaccgccccttcatccagctgggagattttgatcacatcctccaccatatgaataagcctctgagcttccccgtagatccttccggcaaacattgtcacatcctccggcctgacaaagccatcctgaatgatctccgcaaatcctgagatggaggttagaggcgttttcagttcatgggacacattggctgagaactctctgcgcaaattctcccgctccgtctcctctgttacgttcaccagaagaaggaccgccccctgggctgccccttgctctgtcaccggattggcggtcacctgcacatactggccgtctaccataaggacagctgtcctgtgctctccctccaacaccttctcgatcacacagcggaattcctcgcttcggttcagggaatacacactctggcctctttttgtctcctctgtgtgaaatagcttccaggcactgttattacccgacaggatcatggtggctctgtcaatgacaagcagaccttccttcatattatctgttatgatccgaaactcctcctgctgcttgtgggctgtatccaactgctccttgatctgtctgttctgtttgtgaattttactcagcaggggcgccacctcctcatacacctggttttcctctggtctgtccagatccagagcatttaccggctctacgatcttcttggcgatcctggaggcgaaaatcccggacagcaccagcatagctgccagtatccacaaaataggctgaatgagctggatgagcaaggccagaaccgaatactgggtgctggatacccgaagaatatttccattctccaggcgctgggcataataaatggtcttctccgacagggttcccgagatccgctgggcctgccctttgccctccttcattgcttccctcacctcttcccgggtcttatggttctccatctcctgcgggtctgcctgactgtcatagagaacccttccatcctggtcaatataagtgatcctggaatcctcatcctggatttcttccagatatccggcccccatgcgttccacgccctgctccagataggaagcctccttctggagctctatggcaatttgttttccaaaatagtgatacaaaatccccatcaccagccccagtgccagggtggccacaatggcagacaccagaaaaatagaactgaatatcttcttcgtcaaatggtttttcctccaatcttatagccgattccccggacagtctcaatgcagttcccggcttctcccagcttttgccgcagggtacggatgtgcacatccacggtcctgctttccccgtcaaactcataaccccagattttatccagaagctgcgccctggtgagcaccactccctgctccctgaacaggtaacacagcagctcaaattcctttaaagtcagaaccacctgggcatctcccacttttacaatatgccgggcagggcatacatacagtgtgcccgctttatactctttttcttcccttttagcctcatttctcctaagaagagccttcaccctggacaaaaattccatcatgcggaagggcttgcacacataatcatctgctccctggtccaggccagtgaccacgtcatattcacttcccttggcagtgagcagcattaccggaatcttctccgtgtccccattacccttcatcttctttaaaatgcttaagccgtcctcctccggaagcataatatccaacagaagtaaagagggcttcttatcttccatggcgctccaaaattgggacggcattgcaaagccatgagccgtgaggccctggctgtttaatgtatagataaccagctcccggatgctttcatcatcctcaaccagatagatcatacacatcctcctcactaagaaagatagatctggtgctcattgttccggtgaatcccggtgatggaatattccacccattctgctatattcaccgcatggtctccgatacgctcaaaatacttggctgtcataagaagatccaggcctgtcctggcctccagatttttctcatagatatattccccaagctgctccttaatatggttaaaggcgttatccaccagatcatcgtcatccataacttttctgcacagcttcagatccccatttacaaatgcatcaatactctgtgtgaccatatgtactgtatcttgagccatctgtccaatacctatggaggggagcacagcctctctgggcacatacaacgacagatctgcaatgtccgccgcctggtctccaatgcgctccatatccgcgatcatacgcagagccgcggaaacctcccgaagatccccggccacaggatgctggtggagcaaaagccccatacagatggtctcgatctcccgctccttttcatcaatctccctgtctgtgtcaaacaccagaggcgcaagggtctttccctctcccagaacagacctggcagaaagagaaatggctttttcacacaaacttcccatagtaatgagctgtacatgaagctcttttaactgccgctcaaactgtactgccatatcagccaaacctccctgtaatataatcctctgtcttcttgtttccaggcatggaaaacagcttgtccgtgctgtcatactccaccacctctcccaggaggaagaatgcggttttatctgaaatacgtgttgcctgctgcatgttgtgagtaacaatgacaatggtataatcctgcttcagctccactgccagatcctcgatctttgccgtggaaatagggtccagggcagaggttggctcatccatgagcagaacctccggctgcactgccagcgctctggcaatgcaaagcctctgctgctgacctccggacatgcccagagcactttttttcagacggtccttcacctcatcccagatggctgcgtcccggagagacttttccacaatctcatctaacttggccctggagtggatcccatgggtccttggcccataggcaatgttgtcataaatgctcatggggaaggggttgggcttttgaaaaaccattcccacccgcctgcgcagcaggttcacatccatgtccccatagatatcctctccgtccagcctcacatccccggtgatgacacagccctgtaccaggtcattcatccggttcagggacttcagcagcgtggattttccacagccgctgggaccgatgaaggctgtgatctccttttcgggaatattcatactgatatttttcagagcatgaaaacttccataatgcaggttcatgttctccaccgcaatttttgtggtttcactcatagatatctatcctttcgcaattttcctggcggccatttgagacagaccgttgatcaccaggacaaacaataagattaccaccgctgtggccgatgcctgattcaaatgcagcgcctcacaggacaacacatacatatgcagggccaaagtacggccagatcccaggagactgtctggcaccgcggccaccgtgcccgcggtatacataagggcggctgtctctccgatcacacggccaatggccaaaatgacccccgccagaatcccgggaaccgctgaaggcagcacaatggtaaaaatcgtacgaagcttccctgctcccaatccaaagcttgcctcccggtaagcatccggcactgccttaagagcctcctgggtggtgcgcatgatcagcggcaggatcatgatcaccatggtaaaggctcctgccagaagggacatcccccacttcagggctgtgacaaaaaacaacatgccgaacagtccatatacaatggaaggaattcccgaaagagtctccgccgtgatctggatcactgccacaaaccggcttcccttcctggcatattccaccagatagatagccgcaaaaatccccagaggagctgccacagccagagacacaatggtcatagtaaaggtatttatcaaagatggaaccagagaaacattctctgaggtatattcaaattgaaacaaatcagtagttaaataaggaactccttttactaatatatatcccaccaggaacaataaaagggcaacggtaaccaaggctgccagatatgtaagaagggccaggattgtggagcctggatggcggaggctggatttcacacagcctgccctggaggagctttttttcccggcgggagctgcagcttccatggctgccgtgatgtcagtctgcatgttcggacctcctgttcaataaagaaagacttaaattaatgatcaagataaagacaaataatacaactgctgtggcgatcagggcctccctgtgaaggccagaggcataccccatctctgtgacaatatttgccgtcatggtacgcactccctccaaaattcccacgggcattctgggctggtttcccgccaccatgacaacagccatggtctcgcctgcggcacgcccgataccaagcacgatccctgctaaaataccggactttgctgcaggaagcaccacaaagaaaatacttctttccttggtggcccccagggccagagagccttcaaaatagctctgcggcacgctttggatcgctgattctgtcaccccgatgatggtgggcagaatcatcattgccaggagcagagaagccgccagcatactggttccggttcctccgaacagctctctgatgagagggaccagaagcaccattccaaaaaaaccatatacaatagacggtacgcctgccattaattcaatccctgctttcaggggaccatataaccttttgggacagtagcgtgccatgaaaacagcagtaaagatcccaatgggcacgcctgctgcaatggccacgcccgtcacataaaagctggccacgatcatggggaagattccaaacctgccgtttgatggccgccagatcttacccagcagaaactctgccgggccgatctctcccatagcaggtatcccgctggcgaacaggaacaggcagataagaaaaaccgccaaaacagaggtacaggccgctgccataaagaggaatttcattgctttttcttttctgtgattcatggacacacctgcctttctataattcctggggaagtttaagccaggtcttcccacttggtgatttcaccagtgaaaatggattttacctgctggctgcttaattcttccagatcattttctttatttacaataacggcaattccgtctttggcaattacctgggcattcagtcccttgtctgtctcctcttccttcagctcacgggaggccatgccaatgtcgcaggcgccctctgatacaaagttaatgcctgtggtggaatcattctgctgtacttccactgtgacattactgttcaccttctcataggcctcctttaatttctccataaccggggccacggaggaggagcctgccacaacgatggttcccgatggcttggtgctctcataggcagcagcctgggtatcttccttgatatagccgttgccttcgatgatctgctggccttcctgactcataatatagctgatgaaatcctgggctgcctcactgactttttctcctgtgacaatgttaaaggggcgggatactttgtaggtatcatcagccacattctctgccgttgcctctgcgccgtcaattttcaccgccttcacggtatcgttgagggaacccagggaaatgtatccaatggcattttcatctccgcctactgttgtcatcataactgaggtgttgttggtaatgctggcatccatggtggtcctatccatcttctcgccgtcaacctcctcctcaattccgaacagctccacaaaggcgcctctcgtaccagacccgtcctcccgggagaccactgtaatgttgccctgaggcgccgcgctcactcccatggaaaaaagtgttgttccaatcattgcagcagttaaaacacttacgatttttttcttcataattttattctcctcttttatgctcatgtcttgttctcttgtttacaagtgccattataggtggggaaagtaaaattaaaaatcttgtttttgttaaatgtaggttaaatagaaaccatcgccttagcggcacatggtggactattttattacgttcggaaagctctcccaactttccgaacgtaataaaatagtccggctcgcaattgagccggacacaaacgatctctgtatgatccttccagttatagttcttctttggtattggagctggcaaagggtgacagctccaggcgcaggaagtagcctctgtcatggtcgcacaccgggcatttctgaggtgcttcttttgtctcgcagatataaccgcagttcagacagatccatcctgttttcacatcagacacataaagctggttctcttccagccatttggcaaattttccaaagcggtctccgtggaacttctcaatctctgcgatcatgtggaaggagcgggccacgtcattgaagccctcttcctttgccttatcaccaaatctcttgtacacatcatcgtgttcttcatattcattgtgctgagccattcttaaaagctctgccagatcctcggtaatgtctaccggatatccgccgtctatctggatagtctctcctgccatgtcctttaagtgcttataaaaaatctccgcatgttctttctcctggtctgctgtgtagagaaatacctgggcaatggcctcctgtttttccttgcgggcctgggccgctccgaaggtatagcggtttctggcctggctctctcctgcgaaagccctcatcaggttatcctttgtctcactgtttttgaaatctactgacataattgtaatctcccttcctgtattggtatgtttttcctcttaggtcctcaacaacagtatgggcagattttacacaaagtatgcacagaaaatttgtaccctggccctttcccatacaaaatgatataatataggaaccatatagaaacagggggatcccccagcaatcctattcagagaaggagataatttcatggatttacagacaattttagaaacaagaagaagtatccgtcaatttcagcctggaaaaaccattgagcccgctgtggtcaaagaactgatctatgccgccacacaggctccgtcctggaaaaacagccagactgcaagatactatgtgatttcttcaccagacatgctcactttggtgcgtgacaaatgcctgcctccttttaatgccaagaattccaaggatgccagcgcccttgttgttaccacctttgtccatgactgctctggttttgaaaaggataatacaccctccaacgaggccggaaatctatggggagcctacgacctgggactgaacaatgagaacttcattctcaaagccacagaggcaggcctgggaactctgattatgggaatccgggacagccagaaacttagagagcttctggaaatcccggagactgagacggtgatggccgtcatcgctttaggttatcccgcctgccagccagccaaacctggccgaaaaggtgtggaacagatcacccggtttttctaacccccccccctccggccaacggtccacacaaccgcctgtcgtctttattccagatccgcatgcctggaaaacatggatttgtccgtctcctttttttgctccatcaattccaatacaatggcgtcatacatgataaagcacatttgttcaaatgcagatgccattggctggatggaggtgaatccattgccttcccccttccacttgggagagattcctggcataaccaccaccacatccgccatctgagctatggatgaagtgtcgtctgtggtgatcagggcaacctgcagaccgtttttcctagcctttttggccagggctgccagactttctgtctcaccggagccggaacctacgatcaacagatccccggcggctgtatgggggctgcagatctcccccacacaactgacggaaaatcccaagtgcatcagcctcatggcaaatcccttcatggccaggccgctcctgcctgccccggcggtaaaaatatgcctggctcccatgatcgcaccaatgaatttctctatttgttcctcctgcagatactctgcatttctgtacagctcatctaaaatagctgctgttttggtcttaacgctcattttttcatctcctatatccggtaaagatcattgtgccattcttctgtcccattcatcaatctgctgtgccaaagctttcgccgtccgggccggatccttggcatgtgcgatggcgccgcccacaataattatttctgggccacagagaagatacttctctaaggtttcctcattgatgcctccggccactgcaattgatgcccggctggcatatttttgcatatccttcagatcatccaaaggtgttcgccctgctgcctgctgatccactcccgtatgaactgccaggtaatctacacctaattcttctatttttgtaatccggctgggaagatctgacacgcagatcatatctgccatcacctttttacctgttttggcagcttccttcaccacctcctggatcgtccggtcatcactcaccccaagcacggttacatagtccgctccagcctcaaacgcaagtgcggcctcatagccgcccgcatccatgatcttggcatcacacaaaacctccagcgtgggaaattctttctttatgcagcgcactgcatccaaaccatactccatgagaaacggcgtacccgtctctgcaatatccacatctttccaaacctggcctaataatttcatggcctcttccatgctcatatcatccagcgcgatctgtaattttgtcctcatgcttcctcctatgccctcaccgtattttatgggcccatgcccagcctgcagcagacttttcctgctccctgatcgcaagaagggtatccccgccctttcggaccggggataccctctctttttcttaaacagttttaataagcttacttaaaaatcttatttgaaatctgcaacgttttcagcatcaacagtagatacacctgtatcaactacttcgccggtcatttcttcgccgcgctccatagctaccactgcgtcaatagccatctcgcccataacgttggggttctgtgccatgaatgccagcagctcgccgccttcaatgtgggcaatgttagaatcagacttatcccagcctacacagtaaacgtctgtaccgttcttggaagcatctgcaacagctgctgctgcaccgttggtagcaccgtcgtttgttccatagatagcgataacgccgttgttgatcaaggtatttgccagctcctgagccttgctgttgtcaccgtcagagtactgacgctcacccagttcaaagtcagtaccttcaaatacagaggcaaagccgtcataacggttctggcaagaatctacaccagcctgagcatctacaataccgatggtaccttcggttacacctgcatctgtgagcactttgagcatatactctccagcctgaacaccgccggcatagttgtcagtggcataggtggcagaagcttctactgtagcaggagcgtccacataaataaccttgatcccagcatcgattgcttcctccagagccttgttacaggaagttgcatcgttgcaggcaatgatgatgtagtttactccgtcagcgatagcagtctcaatcttctgaatctgctgtgcattatcctttgtttccggagccagccatgtcaactcaatcttgctgccgtcctcattgtattcagcaaccttagcctctgcagcttctttcagacgtacccagtgaacatccatctggtccatggtgatcagaccaaccttggtctctaccggttccttggcatcctcagcgcttaccgctgcagtcatacccagtgtcatagccattgccatcaccattgctaataccttttttttcattttttctacctcctgatagttttttatttgccaaaggcttgctgcctctgaagcacaagtttatgatttctttttgccgccgatcttcatgcctgtacggcgcatgatatccagcaatacacaagctacaacgataagtccgatgatgatattacgcatagctaccggcacgtttgccagagtcagaccgttctggagaattgcccacacagaggcacctgcaataacacctaccaaaaggccgcttccgcctaaggtggagataccgccgataacggctgctgcaacaccatacatctcatagctcatacctgcctgcatggaacccatacctgcagctgccatggtaaccagtccggctacgcaggagcagaaggcagagatcatataagcaatggtagtcgttttaaatacatccacaccggacagacgggctgcatccacattggagccaatggcataaatgtgacggccggtgcgtgtataattcatgatatagttaaatacaaaccagataaccagtgccacgatcacaccgtaatagatcacgcctaatcttccatagtaaaacatatcacggaatccatcaataagaggggaacttccgatgtcaccagtattatagttgccgtttacgatttctgccagaccacggcagatagtcatggtacccagagtaccgatgaagggcggcagtttaaactttcctaccagcacaccatttacaccaccaaccatcagacaggcaacgatatcaatgagcacagccaggatggggttcatgccgttacagatcaacgtggctgagatcatggcagacatacccagcacagaaccgatggacaagtcaatatttccggtgatacatacaataccctggccgatacctaccagcagatatgggcaaatggaacgagtcagggacatcaggttattcttggatataaaattcccgttcataaacgtgaagataatcatcagaagtataactccggcaaacgcagtcagcacagatgccatcccctgcacagccataagcttctgaaacttgttcttttccttcatagaaacactctcctttttctagtttcagatcattggtttaactggcattatcgccaaactgagttgcatgtgtcataatttcctcctctgtggcttcacggggactcacttcacctgtgactcttccgttgcacataacaatgatccggtcggaaattcccataacctccggcatctcagaggaaacaatgatcacccctaccccgcgctttttcaacgcattaataatctgatagatctcaaccttggctgccacgtcaatacctctggtgggctcatcgaaaataatgactctggactctctggccagccattttgccacaaccaccttctgctgattgccgccggacagacttcctgcttctacctgaggtcctgccatcttaatagtcagcgaattccgtcccttttcgatcatttcatcttctattttcttattaattcttccccctggtccacagatgagatccaggttgggaagggcaatattgtcacggatagacagcttggtgcacagcccctccttttttctgtcctccggcgccagcacgattccctggcggatggcatcatccggagaattgatcaccaatgtctttccgtccaagatgatctcgccggattccttggggtctgctccgaaaattgcccgcatggtctccgtccgtcctgcgcctaccagtccggagaagcccagcacttccccttcatacagatcaaagcttacatctctcaccatacgccctgcattcaaattcttcacctcaagaattttcttgcctctgggtaccgtatctctggggaactgattggtgatctcacgtcctaccatgtgggcaataatctgctccatcgtaaaatccgtgaatctgccttctgtgatatatttaccgtcacgcatgatggtaatgctgtccacaatgtggtacagctcctgcaggcggtggctgatatacacaatagcagtccccatggcctttagttcatggacaatacggaacatttccgtaatctctgcattggataaggatgaggatggctcgtccataacaaggacttttgcattgatcagcaacgccttagcgatctccaccatctgctggcgtcccacggccaggtctcccaccatggcagttggatccaaatcagtgattcccagcttcgccagctgctcctttgcctagcggttcatctccgccttatccagccggccgttcttgaccagctcccgcccaagaaacatattgtcagccacagtaagatgctggcacatatttaactcctggtgaatgatggcaattcccatctcctgagcatccttggtggacagatccccctcgaccttctttccgaacacatagatgtccccggaatctctggtataaacaccggacaaaatcttcatcagggttgattttccggcgccattctcacctagaagggccattacctcgcctgatttcaaatgaagctgtacatcatccaatgccttaacccccgggaaggtctttgtgatatgctccatagaaacagcatattcgctcattcattttctcctttcttactttattttcagagaaatccaggaacctagtcttgtcgtttttaccattgaagtctctccccttcctctccaaagataaccattttaactagtttgtgcctcagtcttttgcaggcggatactcgttacacagaagacggtagggcgcttcatcctcttcaatggtggggaaacgtcccaaaggctcataaaagcggttatcggtattgtcatcattgcacatagatacctctccgatcagagcttttccagtgcctggctgaatgtagaattcatggtaataatagggatacagagacagggactctcctggatgaaggatgatctcttcccctggtttcaccttgtagttacgtccgtcccggctgataagaacatctgtatctgccagtccctcttctttatcggcattccacagacggaatactaaatttccgcctcccctgttaataatatcttccatcttattccagtggaaatgattgggggagatctggccttccttgagcatcatgatcttctctgcataacatttggtatacttatcgttatgtacattaccgtttctgatggtgatcagatacagccctttcttgtcaaaattgccttctccataatcggtgatatcccatccaagagcattgtcacggatctcatcgtattcgtgccctttttctgcccactcctctggagtaaagctaagaaatggcggaagagcaaatttatactctttgagcatttcttcgaattccttaatacatgcattgatctctgaacgtttcattcttctctctcctttgcttatatatgatatgtattttcaaatgccctcactgcagcattgatttcctcatccccgtctaacaccgtaaacgaaagaaccattctttccctggcaaaaggagccagtttatgaacatttccttgtttctcatgatagggtctgccaaaaacgctggagttggacggctccagtccgatcacatagtctcccgccgccgtggatttccactccataaaataaggcagaaatgcggtattatacttgagtttcaagcccagcttcaggtgcctgttcagcactaaaatctctgtatcccccttagaatctgtcttcagatcatggatgaatacatactctggttcattctccttaggcccgtccatgtggtcgtaatcctgttcatgcccttcaccggccttatctctggccgttacacttctggttgggatcataagctgtgtatgttcatccaggaagggatagcccatattaatatgatacagaagcatcatgggttcctctttataggcctcattttcaaattcatccgtcacagtgatggtcttctctccataaacgctgcggatctctctgcgcaggattagattctctccaaacagagctgcctcacgcatttctcccttgacaatgagctggtactcgtcatccttccaaaaggcatctgcactaagatgctctcctggtgttgtgcggattcttccatgcatgggataatcggtcccgtcaatggtacatggaccgcagatattctccaaaccggaggtaaagaaaaatcctcccataatgctgcggatggcctcatccttgttggtgtcataatgatttctgccctgcagccctggcttggagagaaagttaatgtttattcctttataagataaaccgctgatatccagacatttatctgcaaggacctggtagctgaggcagccattcttcacttcatatgccttcaagccagagcttctgccctcagcgaaggtcactggacgcacataggccacctgctgcatacttcccacatattttaaaagatcttgcttcttcattgttttcccctgtttctctctatcttcttaagcgacactgccgttacacttattccaggttcgcatgatactgccacagagacttcatgtccagcttgcgctcttcaatgatcatcttagccaaaatgtctcccattaaaagaacgctctgctcaaacaaggaggtcataggctggcaggagtcgatctcatcctccagataaaacttggtccgcacaggaatgcgtaccatgaaatcgcagatatctttcatctcactgtttgggttggagccaatatgtacaatcttgcagtccacagtatttcttgctttttttgcaattcccagagggaacaaggaacctccggagcctgagcctacgatcagaaggtcattttttgtaatggccggctcggtgatctctcctacataatgggccttaatcccaagatgagccaaacgcttgcatacacactgcagcgccagcatcacccggcccacgcctacgaaaaatacctgatccgcctccaaaatctcctgtacaagtctctccagagactgggcatctatgctgtccagggtcttctccaattctgccagcacttctgtacaggaacgcttgtagctttctttaaactccatgactttactcctttacatcattttatataatcttctactggaaactctgggacaggtcactgagctttgcaaagcttccggctaaatcaccacggtccaggcaggtactgccggttacaaaaatgtctacatcatttttaccgtaattctgaatgttttccagagaaatacgcccgtcaatctcaatcttggtgtccagcccccggtcattgatcattttacgcagctccttgatcttacgctgtgcgtaagccacctgctgctcacccttgacaaaggcatatcctgggttaatgagcataagcaggactgtgtcacatttctctaaaacatactccagttcagacagaggagttgcaggcttcaatgccacgccggctctcacgccttttgcatggatccggttgagcattccgtcaatatggggctgggtctccccgtgaaatacaatctgctccacccctatgtccagcagctcatccacgaaataatcctgctcggtcaccatcacatggcaatcaaagaccagatctgtctttgctctgagctgtcgcacggtatccaggcccaaaggcatgctgggactaaaatgcccgtccaaaatgtccacatgaagcattttcattcctgactgctccagaatgcggatctggctttccagattacacatatccaggcagatcagggatggtgatatgatacatttttcctgccaaactgaattcattccttcttcctccggatcatccattaatttttctatattcttcaatctgttctcttgtgggtatggatactatggctccctttccctgcacacagatgcagccggatacatttccatattccatagcctcttttatcatgtcctctgtgagatcctgtgcacaggttacctggtgaaaacgcagacaggagataaaccctccccagaaagcatctccggcaccagtggcatccacagccttcacacggcgtccctgaacccggatgaccttgtcattgaaaaatgcctgtgcgccttctccacctaatgtctccacaagcagcgtgatgttattttccttcattaaagctggaagagcagaagcaccgcccagcatatctacctcttcctcggatatcttcaagatatccacatagggcagaatttccatcacggcctgggtgcaggcctgcacatcatcattccacatgagattccggtaattcacatcaaagcttaccagctttcccagctcatgccctgtgcgcagggctttcctggttgccccggccaccaccggtgctgacagggaacaggagccggcgtggatgatcacagaatctttgagatcctcttctttcacctcttcttcggtaaggaacatatccgccccgggcttcctggcaaaggtaaatacccgctcgccgtcctccgccagggagacaaaggccattgtggtgactgcctccttacataagttttggcaagctgccttcacctggtattccttaagggtgttcagtaagaaacggccaaaatcatcatctcccaccttacagcacatgcttgcttccagaccgttctttgccaccgctatggccacattggcaggtgctccccctgcctttctgatgtagctttccggttcacttcccgggataaaatcaatcaccatctcaccaatgcaatatacatctgtcattttccataccctcacatccagtttattcgtcctattagtaaagtcaatttattatctctcgttaaaaagagtttatcgcaatatgaccgcaaagtcaatactttaatgcattttctatataattacacaaaatcgcgctttgtttcttgtaagaattgcacagtccagttttaaaaaccattgtcatctggggcgcagctttgacgccaatgtgcagctgcaaagcagttttctgcattccccggagggtttttattacagaggaaagttctgagaacttccctctgtaataaaaaaaagaattcgatattctcataccgaattcttaaaagtttacacccctacagcagttctcccatgaacacctggtcaatggcattgcaggcagctccaaggacctggcttttatccagaaatgctgttttcatcactttaatttgaaaatcactgttcccgaacttcctgtgattaatttctttttccacaagttgtatatatttatccggccagtctgagcaccccatggtgagcagaacaatctgggagttcataatattcagtacattcaccactcccatagccagcttgaaggctacatctgtcaatatcttatctaaatcgggatccgattctgccatagcgcagaaatcactgtaggtcagatccgttcttcctgaaacctgacgaaattgttcacttaccgcctttgtattaatatagcgttccagacagcccacgtttccgcaagtacacagctccccccggtagtcaatggaggtatgcccaatctcaggcgcatacccggagtaactgtgcacacgtctgccgtccaccaaaatgccgcagcccacaccgctgcccacacctacaagaacaatgtcctgatatcccctgccatttccatacaaatgctcagccagcacagcgctttggttatcgtggtcgaaatacaccggcaggccgtatcgttcctccagcagcctgcgcacaggtatatttccaatgccattaaaataaaagggctggacgatcctgccctggttcacatccactggtccaatggaggctgcaccaatccccgcaacccggcggccgccttccaaaaccctgtccaatacctggtagaccccttctaccacctcttgggcggtggtccatatctgatcgatcttttcaaacttcaggatgttcagctgcatatctaccagcacggcctgacagctttctctttcaatcaacacgcctgcataatggggcgcatccagagaaatccccagttctacgggggtacggcccagctcctggtcatggcgccggtgtctgcgcacctcttccagataattcagacctatcagctcacctacgatctgtgagattgccgtctttgtcacccccgtcgccttggatatatcaattctgctcatacactgatgggtagcgatcagcttcaataccaggccgcggtttatctttttttgattatctctgtttacaccaagttttgacatagcaaatagacccccacatttatgggaacattataagataactccctcgctttgtcaaatttccctgggggcaaacctttttcccacagccgccgtcagaaagacacttaagaagaacgccgcatagcaggtaaaaaagcgatacagcaccatggtggccccgcacagagctttcccgagaatgcctccgtaaacaaacagatataccgcctctgttgaaccaattccacctgtgctgggaagcactcctatcagaagctgcataacactggtgaggcatacagcccccagaagcgttacaccgtccatgctctgccccaaggcacggcaggcacaaaagggaatcagataccagcaggtcattttcagtacatttaccaagaccacctggactagttcccctttatggccggagaagctcttcattacagcccggagctccttcagttgaacctgggcagcatccagcctggaaacccaggcttccttgtggatatgctttttcaggggctgcaggaccagactgtgcacctggccggatacacacacccagataagcacagccaccaccagaaagctgattccaaaaccaaaagccaggtaccgccgaactccctcataatggctattaataaagctccactgaaacagcagccccaaacaggcatacagtaccaccgctattttataacacacatactgtatggtcaaaattccggcagcaggccccggtttcacatcctttttatagaggtagaacacctggctgggctttgttcctgccccgaaggtggcaatgttgaaaaatactgccatataggccataagaattccatctttccttttgacctgactgctgtttctcctggcggtgagataataggcctctccgtccaggatgtaatagccgttccccagaagaaacagcagcaaaagccaggatttttcagctcttttgagctgtccccatatttctggccatgaatcccgaaagaccagatacaaaaggcttcccaaaatccccaaaaccagcagggacactgccgcccgctttttacttgtcttcatataccttcttataattctgatagtactctacgtgatggggattttcttcccaaagctcatctgctgccgccttccagtcctgggcataggctttacactttccgcataaatgctgtacactttccggtgactgtagatctgtagatcttgcccccgtctcttccaccattttctgaaggaattccggattctccagcatgggacaaggacgcagatggttgccgttaaagggctgattgtcccggtaggccatgaaaataggctgccgcagggaatccagcagactcacctcacggatattggcgccggaatagtggatgaatacacagggctccacgtctccgtttgcattaatatgcatataattccggcctcccgcaatacagccgcccacaaattctccgtcattttggaagtccatggcaaagataggttttcctccttcctttgcccgaatctcccggactctgtggtacatgtacttgcgctgttcactggtgggcagaagctccggtgcagcgtcatttcccactggcatataatggaaataccaggtataccggcagcctttttcaatgatcatatccaggaattcatctgaggtaacggtgtcaatattatttctcgtgtagcagatggaggtgccgaaaataagtccgtgctccttcatccggtccatggcctgcatgaccttttggaagcttccctgtcctcttctggaatcattgacctcctcatatccttccagactgatggatacagagaagttgcctacccggcgcatatcctcacagaattcatcatccagcagggttccgttggtaaacgcgtggaaggcgcagtcctgatgcttttcgcacagacggatcagatccttctttctcacaagaggttcgccgccagtgtacatatagaaataaatccccagctttttcccctgggtgatgatatcgtccagctcctcataggttagattcagcttatgtccatattctgccgcccagcagccggtgcagcgaagattgcaggcactggttggatccagaaggatcagccagggaatgttgcactggtatttctttctgttctcacgaatggtttttgttccgaaatagcctgcctcaaatcccagattcaaggctgtcattttcagcacgtgaggatccacctcgtccagaatgcggtatacatacttcatccattttccgtcctcgtcctgaatgagtgccctggctccttcatagcttttctcctggaacatatcccccgccatcttctccacaacatccaccagattcagaagatgcttctgtctgtccttatttacataatttataactccgtcaatggcctttgccactaacacccgttctactttttgttttgctgtcataattctttcctccattatctgtaaaacattacacgaaacgctaacaatataaccagagcggcatctgaaatacagagcccctttctgccagtcactccattcaagtacccgaaggtgaatccccccaccgctcccaggaacgcacctgccacgatcaccactgcggatctccaggaataggaattcaaataatacagacacatccccagaacaaatgccattagactagtccgcacagcgatccatacacaagacctcacagacaggttttcttctttatgttctttaaaatcctccttttttaaggctgctgaaatgcggacagctccgattcccataaggagagcaaaggtcatgaacaggcagcccctgctcagcagatgaatcttccacacccgttcaaagagccatacaagaaccagtcccaagccctgcatgagaacctgaatgctcataaaaacaaaagcgatagccaatattttctttttccccattttctcctgggtggctccagtctccatggcggtcacaaaaatatgtaggaataagccaatggccacgcacattgtccacaatcctgtcactttgctatcccccctttcgtcctttcttactttaaatataaaccataattcccccgaaaataaatatgcaaacccgggccggaatcataaattcctttacacatgatccgtcctgtcgaagtagccagacatttgtggaattttgtcaatcacaaaaaaatcccctttgaaaatgaaaattctctcattcccaaagggggtctctcttttaaaggaggttattcctctcctcttataatttcagccaaaggcttagacatgatcagatcataggccgcgatcacctcagagggagggatttcctggtcctcacttaaattcagccatttcaggatcacgaactgaaaaatattttcaaaatactccgccagggtatctgctgtgatcagcgggtggctctggggccccattttatcctccagtatcctgcgcagcagcttcataaaatcccggttcatgatctcctggaaggagttctgccccgaaagcctgctgatcttccggtaaaaccccttatccttttccatctgtacaagaaggcacaaaaaagcctcccggtcaaatccattttccaaaaaaggcgtcatgggttcaatgatctccttctgaaaaatatattccactacctcgtacttatcctgaaaataagtataaaaggttggtctggtaaggcccactctgtctgtgatctccttgatcctgatcttctcaaacccattctcaaggacaagctccttaaaactctctgtcagcttttcttttgtatctgatttctgaaactgcatgtatatcccttctaaaatccttctgctaaatcatggtctccagcgtcctgcgttctcttcctatatgcctgcccgttcatataaactccatccaacgggaaaacaggctgtgcaccagctccagcaccataaccttggaattagggtccagctcctccactcttttaagcatagctccggcacttttcaagcccccgttctggacctgggtaagggtctgggcccctgtggcctcaaacacagagaaaagatcatcaatcagtttgtctctctcctgcatattcatgccgtctatccatttgtgaagcgtgttgttgaacaactccgtcttcttatccaaagcctctgcccttacaaaggagggccccatgacctgccaggaaaaaccatcatgctgaagaatccccttctgagaactggcgatcaccaacggctctttcacatgtcccagaagcattccgatcacagagcattccgggatgattcttcgtatctttctggtaatattccggaaatcctcatcctccagaaattcctgggcaaatcccggaccgtcattgtcatagacctcctgtatccggtcccggacctgtgcctcacatttcgctgctgcataaacagcaagattcccgcctttggagtggccgcccacccggatcggcccctgccgccttcctgcactgcggttcaaataatccgctgcctttttctgagcaggaacaatgccgttgcttaaattaaaatcttccttccatccaacaatggtatcatccgtacccctaaaggatatatagcagcttttgtccggcaggataagctctacagcagaaaactgcagcgtctcctttgtggcgatctcatttacataatttccaatgaaaatatcccggtacctggggcaccgggccatatccgccagcatatagggggccaggcggatgaaggatttatccgcctccagctccttctgagaatgcatggcaaaaaagatcttggaaacctccggaagggacactgaattccccccggtgatctcatcgatcccatctaagtttacataagacaggcatgccagtatgagattatccacctcattaaacggtgactgttctaaagtgagatcacctctccactgaatataatccataattgttcccatagccactgccctgcctctctatagtcataatgtccactggggcgtacgtcaccatcacctgcagaacccgccgatggcagcttccttggatatgtggcgataaaagcccatcccttcaggcgatgcactcttttcaccgcctccttctgggattcatacagtaatttcttttcattataacaaaattagagcacaatagcgagcatatggaatcagaaatctaaatatttttttccctggaatggacatgactgtccataaggtacatataggcatcctccagagttccctctccaggcctgcagtctggttcattggggcagtctccgatcaccttgagcagcattccctcctgggtatactgctttgaagatacatggtattttctctccagctcccgggcctcctggtcatctctcaccccgcacagccacacacgcccctggacctgcttggtcagttccagcatggatccgctgtacataagaaccccttttctcataaccgccagctgattacaggtggccgccagatcctccaccacatgagtggaaaataatacggtcctgtcctgggcaaactctaccagcaggttccggatacggatccgttcctctggatcaaggcctgtggtaggctcatccacaatgagaaactccgggttgttcagcagcgcctggatcagacccacccggcgcttcattccgccggagagctgcttatttttcttcttctggttctctgtcatactggttttttccagataatagtctatgcgtctctttctctctgccttcggaataagagccagctcccccaggtaatccagacattctcttaccgtcagctccggatagagctgcagctcctggggaagatatccgatcttttggcggatctgttcataatttctttcgctgtaggagattccgtttaggacaacgcttcccgaggaaggcttccgcacagtggtcagcacccgcatgagtgttgtttttcccgcaccgttttctcccagcaggccgtaaatccccttgcccagctccaaatttacatgattcacggctgtggtgccatttttaaaggtaactgtcacatccttaatattgatactcatctcatcaccaaccctttctatctaacataggcggaactgccaaaagcagaactgccgtaagtattaaggcaatccccttgccccacatccagctaagaccccagccctcctgggcaaaatggaagctgaaggcaaaaacattgtattttcccagcagcagatctccctgggtggagttgcacagcatccacagaggaagagtgcagccaatccctgcccataaatttttcagcccattcacaagcgtcatggacaccacaccccagaagaagatactcactgccactgccggcagataccaggcgaagattgtaagggatgaaatccccgcctcctctatgggtttctgccaatagaaaaatccatagcctgccagggcaagcacatatagaaagcacatctgcagaaatagtcgtttatagacagcctttgctttgctcttgcggggaagcagcttcataatctcccagcgtctgccccggtgctctgtctcataagtatccgcacacaggaccagggacaacagccccataaacacatccaaggtgatactgatctccaacacccctgaaatccccctcaccagtgacagaaggaccacaaacaaaaaagcatagcatactttataaagaggcaggcagattttcctttctatattcatcatagactcctccttttccataaggccgccgctgtcactaccagtacgatactggcgatcactagaaagcactggttaagcgcccacaggggcggcggatctgtctgaaaaaatcttccggggaaccgtaccataatagctaagggtctgccgtaatagtcataatagccgtccggtcctctgctgcccatattggaatagaccatatagacaagaagcaggggcagtccgggaagagggttgcgaaataccatggcaataaaggtatatacacaggtgatcatcagcatattgggaagaatatacaccgcccctgccagcacaatatcccagaagcgcaccggaaatccctgcctgcttccagaaatttcacacagcaggccgaataccaccatcaaaactacaagcactgccaccagcacccccattcctccggccaccttgcctccaatgtaggcgcctggggatatgggctttgtgtgcaggagctcgtaggtatcctttctggtatcccggacaaaaagaaatgccagcagaactgccgcaaagccacccatgaaaagtcctgcaaagtccgcaaacttcctggcaaaataccaggagtagggatgctcctccatgcaggcgtccagataggcattgacctcctccatggtccctgggcatagatccagttccttaaaataaaaatctgccggaaaaccgtaatcattttccaaacgctctgtgatctctggtactggcagatccttcagttcctccaggagcttttcggcctcctttggcttcattccagagatatttaccagatcctcttttatcaatgccagtgcaaagggcttcctggtctcttcatctgcagggataaacccttcatttatatccgcctcaccatagaactccagattcagacgcccctcccactggctgcgcacctcttcctctgactggaaatagtggatctccagataaggactgagctggacatacactccccagatcacaagaatcagtccaatccataaaatggggtttttcatataatttttgaactctctttttataatggcatacatagaatccctccttttttctatcctcatgttaccaggcaaatctcaacaaaaagacaacaaaaaaaccggctcctcaaattatttgaagaaccggtatctctccttgtgcagcctcccacacgcgaagcagtcatagtcatccctttatttcattttccaagccggggcagccatccttctggccctcaactactccttccaaaaaaacagcctgcaccaaggctcctccctctttggaattccccacgtatagccttcccccatgtttttcgcagtacaccttgcacagatacagtcccagtccaaagtgactctggtcatccaccgggttggcatgatagcaggcctttgtcaccgtgtcctgatcctgatgaaagccgcttccgtcatccatcaccagaagctccagtgcctgttccctttttctcagctctatttcaatgctttccctggcatagcggcaggcattggagatgaggttttccgccacctccaagataagggggccgtccaccacagcctcctgctccttgtcccttgtgcttacacgacaggtctttcccagctcccgccccataacactggcggcctgtgcgatctggtcctccagctcctttagggcgatcctgccacagcagatctgtcgctcttccagagaagacagcctgcgcatggtttccacgaacgcattgatcctgtcaatctgtccaagtccggcttttagaatctccaggaccttgtccttatccagtctgtcctctggcacaaattccaggagcatttcctgatatccccttaaaacggccaagggagaacgaatatcgtgggcaatggcagcccgaagagccttctcctcctcctccattttccacataagaccattgttctcctgaagctgctgccgcattctgtcaaactgaatacacagactgcccaactcatctttatttttataggctatggtaaagtccaggtcattttccccgatcatccgggccccttgtgccagctcctccactggccttcggatcttatttctataaaagagaaagacgcctgccgtacacccggctaaggaaaacagcaggatgctccaggtctgaagaaaatcacagacctccaccataaagctgtctgcagcggacatatccccacttgggattctgggaaccgttcccaaatcatccctattgtatccttcctcttctatataggagccctggttaagatactttctccaaatctgcttctgggtattctctgccgccgctgtcaccgccactccaagaaagaagcacaccaccagagagacagtcatatataaaattatggaattgcgaagggatagatttcttattttttccatcggtaccccattccccaaacggtttctataaattcctctgacgaatatttggaaagcttattgcgtatccttctcaccagctcggtcaccacccggctgtctccgtccccatcgtatcctctgatgcgctcgtagatcctctcccggtcaaacacctggcctgcattggaggaaaggaactccacaagctcatactctgtgcctgtaagctcgatctcgtttccggaaagctctacacttttgctggagtagtcaatgatcagcccctccctgaaccggaacctggacttggccctttgtcgttcctcccgctttaaatgagcagtgatgcgggcttccagctcctttaagctgaaaggctttaaaatataatcatccccgccggacagcaggccgtttatccggtcctgctcctccacctttgccgtgaggaagagaatggggcaggcaaccttgtcccggatctgcctgcacacctgaagtccgtccatatggggcatgttaatatccaaaaggatcagatctgggtccagcacgatcttttccagggcttcccttccgtcccgggcagtttccaccacatatcctttcatggttaaataactgtccagcattttcaatagttctgtatcgtcatctacgatcaacagtttgtatcccatattctcaccttagcaccttccctagcatattcagcagctcctgggtctggatcggcttggataaatgcccgttcattccactttgcatagactttttgctgtcctcgtcaaaagcattggccgtcagggcgataatgggcacagaacgggaatccggcctgtccatggtgcggatcttcctcgtggcctgaaggccgtccatgacaggcattcggatatccatgagaatcccgtcataatatcccggtgaatggtcctgaaacatagcaactgcctccccgccgtcattggcacattcaataagaaagccctccatttcaagaatagtcctggcaatctcttggttcatctcattgtcctctgccaacagcagtctttttccctgaaaatccctggtggggttcttatcaccagaactctttggcgctgtcggctgttcacaggaataggaaaagggaagggtaaaataaaattccgaaccctggcccacctgacttttcacctgaagggtccctcccatgagctggaccaggctgctggaaatggccaaacccagaccagtgccgccatggcgagctgctgtgcccctgtccgcctgttcaaatacattaaatatccgtttcatagccgaaggctcaattccgatccctgtatcttcaatggaaaacttaaggaagatcccttccttctgtgtctctcccaccttctctatcttcgcagtcacggtcccaccctggtctgtaaatttaatggcatttccaacgatattgatcagtacctgattcagtcttagctcatcccctgacaacagacggttctcctgatattcattttccatacaaaggctcacaccctttgtccgggcctggggcttcaacatatcctccagattctggaaaagtctgcctatatccaggggctcatcattaatctccactttcccgctttctatacgggacatgtccagaatatcattgatcaaactgatcaggtaggcattggctgattcgatcttctccagacattccagggtccgtttcttatcatccagcacacttttggcaatggatgtcattccactgatggcattcataggcgtgcggatctcatgagacattctggacagaaagtccgtttttgcctgactcaccgcagttgccttggccttcataaagaaagagggaacaattttcaccagctccttcagcagcttcctctggttatctgtccactgataatcctcctgaagaacctcaaagctcatctctccaataaagtctcccccatcccagattcccccatgaaggccgcaggtcagggtatatgcttctggatggggattttttgcgctcagtccctcctgatcatagctgtgggccatgttatagagttcctttcccgtcacatagaactccctgcccagcataaaatcgttccggcagcgggcccactgataggaaaagtgcatggtgagcagatcctggtctacctccaaaatagatacccggtccaggtgaaagctcttgcccacccgggacaggagcaggaagaccgcatcgtccagcttctttgatttccccagcagttccagggcaaaggataccaaatcctcatcctcctggggctgggtccggtctatggcatttaaaggatgctcctctgtgtaaagctgggtcagcttgatccccagctcattggaggtatccagataacaggcagcagagccctttccattctccttcacatactttaaggcactctctgcacacctatacagggaatggtagtccccggtcacatctgtaacacacatgccaatactcacagacaacctggactgcttctggggccaggatacaatgccctttaccagctctgcaatctgcggtccgatcaaggtggctctggccttattgcagtttttgataaacagcataaactcatccccaccgattcgtacctgaatatcctccttcccggtctctcccacaagaatggctgccgtctcctggaggatcacatctccaaaggctgatccctcctccatgttcatttgtttaaagtcatccatatccagaagcatcatacagcagcactctgaggcaggcctgctctgcatatattcttgaacgatccggattcctgtatctttattataaagccctgtcaggctgtcccgggaacgggcatcgtccaaggcctgctccatctccttttgatgagtgatatcctctaaaattccaataaccagctctgccccttggtcctcccggtagccgatcacggtcagagtcactctgcaccaccggtccttttcattggtcttaaattccatggaatctgccttttcacctagacctgctctttcaaacagagcacagaagctctcccggaacccaggggccacgaactcttcagccagactctttggtgcatgctcatactcttccctggtgctgtacatctggcacagcctccggggaaggatacacctgccttcacagggatagtaaaaaaattcacaggtggtagtatgctccagggccatctgaagaaccttgttgctggcctccacctgatccgtgagaagacgattctgctcaagggcctttttgcgctggttaatatccaggaaaacactttgtatgatcttctctccttcaatatttaagagaacctcagcacttcctatgatccagcagggtgagccgtcccttctacacacacggtactcataggattttttatctcccacttccttcaggcttcccacctctgccagtattctgtctctgtcctcctccacgatcaatgcggacagatcccagtctgtcttagcccagaattcccgaggctggtagccaaatatgcggatggcttcacggttggcgttttcaaagaccacctcaccttgctggtccagacggtactgaacaattccgcacagaacagattccaacagattattatagcggtccgcctgcctcttcttttcccaggcatccttttccagcttttccttgctttccacttctcttgtaatatcccggataacactgatgcacatggccctgccgtcctcagcgatccccttcttgcccacatcattaacccaaatgtaggagccgtcctttttcctcattcggtactggacactgtattcatcttggcgggcaaaagcctgctccacagtgaggtccactctctgccggtccagaggatgcatacagttgatcacatgcccctgtatatctgctgcaaattcctcctcatcggcatatcccagatattccagcatattgtcattaatataatacagaggaaaatccttttccagatatcctcccatcattccccctgagataatctttccaaagatatccagactctttgcctgaactctgcgctcaaactccacccggtctgctcctcttgccgcagatgggaaaaatactccttgtacctgctccacatttggtgtggaagcatgaatggaaaaaattctgcagccctgttctgtcataatacagcaggcattcgcccggatgcgcaccgattgctctcctgtggataccagagcacgaaaaagtacagacgctgtgttgtctgctgctatgttttcatagattgtctcaatctgatagtcatatccctgggggtcctggcggaattcctgctgaagaattgctttaacttcacagatcccctgtgcaaactcctgctcccctgttccgatccattgtattccctgggtaagacataacaacgtcctttccacatcccgctttgcaaaataggcgtccaagaattgcaaaacaatggatttcccgtctccaatcttcatccgaatgctgtcctctcgaatttttctgaataatttacacgattatcacctatattatatgtaatattctttgggaaagcaagaaggaaaccaggccagccttttaaaacaaagcagacaggcccgcttcagctccccatcccctcactctggaagggcttggaagctttgcgcccaatgtgccgctgtgaaacagctttcctatagaaccagaaaggggcagaccacacatccttgtatgttctgccccttcatttaaaatttatatttgcctgatccatcggcattgcttttgcatcgcccctatcctcagattcttatctatgtgtaatttatcagctcaccatcagcgccggactcatttttgcgcagcttgttttatcattgagtatttgaatgctttttcttttgatcttaagaaagttctcctcctccagctttttcaaaagtctggatatgacctccctggaggaagccagctcatctgccagacgctcatgggtaacggggatgatatccgtatcataaagtgcggcatattccaacagcttctttttcaggcggtccttcaaagaaaggaaacaaaggtcattgatcagctccagaagcttggaaacaattttcatatagcactgagactgccactgccttacacttgcacactcattatagacttgtgtgcttaaacgctccgggatataacacaattccgtctttcccacacagacggcttcaatactgtagatcatggagtccagacagccctctgggagtatgaacccggaattctccgccgtgatcttgagaagcacgatggtcttcccgtccacatcacgcatgatcagtcgcaccccccccctaaaagtaaccatatttttcggccgttgaagaactcttccatatcaatgggctctgaatcttcaaatctgcacaacaccatgcggtcctcgatctgagcctttgttgacagtttaaggtcagccagatatccccaaactctcctgcacttttcattgtccactgaattcattatacatctttccatatttctccctcccgacacaacaacgcataaaacttgtttctgaaaatgttttccttaacttatccctgttttccccctttcttgtactatgtgcatatttattatgaaaatgttttcttaaatcgttttcttattgtataataccatatgctcttaaacgatgtcaatctttgttccaatttttgccattattcctagttatggtattgcttttttatacattttgccatctgcttctcagtgtatgttgacaaaccctgtgttttatccgataataaaataaaacaaggtgtcaggcccatccctgcccccaatccagggaatcatacactttgcagccacaaggaaaactaccatgagggaacaactatgacaataaaagatatcgcaaagctggcgggcgtgtccatctccactgtgtcaaagatcataaacggtaaagatgaacacatcaatccccagacacgtacaagagtacttcagattgtaaaggaatataattttactccctatgggtcagtaaaaaacacattaagcggcaaaaagtttctgctgggcgtgctgctccgctccacctccagatccagcttgatgttaagcggtattgtaaagaccgcccaggagctgggttatggaattttactgctggacagccaggatgactgcagcagggaggcaaagcatatcacggttctgtgcaaaaaccatgtggacggagttctctgggaaccggtgtcagaagaaagctatgtgtgcaccaaggatctgaccaggcagatgatcccctatttgtttattgacagtacggaccattctccttcctatcaaattgattttggacagctgggttatgcactgacacagaagcttattgaaaaaaagcacacaaacattgcctgtcttgtaaaggaaaacagcagccgctctgcaccgtttctgaagggcttccggaaatgcctctacaacaatctgatcccctacaccaatgaaatgatcttttacagccctgaggacgacttcatccccaagatgatccagtataatatcacaggagctgtgagcacccattttgaggcatctctttctctctatgaagcacttgaaaagcagcattatgagataccctttaatttttccctggtgagccttcggggaggccggtatgaagactgtgcccatccccccatatccagcattcagattccctatgacgagtttggaagccatgtgtgcagggagcttatcagcatctgtgaaaaaacccccggcagggagcccgcctatgtattttctccctcctgccggttcaatcatgagtacagcgtcagtgagcccgccttcctaaagaaaaaaatctttatttccgtgggcagcatccacaaggacaatacctttaatgtaaacatgctgcctcagctgggcgacactctcaaaattcataaggccactgtcaccattggaggaaaaggcgccaaccaggccgtgggaattgcaaagctgggccatacggtaagtctggtgggagccatcggcaacgatattgacgcttcctttattctcaatgaactggaaaaagaaaatgtatccactcagggaatctgccggaacaaaaatacccagaccggaaaagcttatatttacacagaaagtactggtgaaagtgccatcaccattcttcccggggccaacgatgaactgctgcctgaggatattgagaacagccgctacttatttcgaaatgcctgtttctgcctgatctccagcgagatccccctggaaactgccattgccgcctcccaggctgccagggaaaacaacgtgcgcaccattgtgaagccttccaccctggaaatgcttccccagaggctgtgccggaatatcgacattctcatccccaataaaatggaggcctgcgccctgtgctcccagtccgtgtccgtggaacaccaggcagattatttcttcagccttggcatccccattgtgatcatcacccttggccatgagggatgttacttgagaaccaaagataccgcccggtatttcccagcctctgactggaacgcagtggacaccaccggcggtgcagatgctttcatctccgccctagctgcctatttatatgacggctattccctggaaaaatccatccagatcgcaaccttagccgcaggcttctgtgtgtcccggcagggcgtgtcctccgccctgatcgacaaaaacagcctggagggctacatagctaaaaccatgcctgaactgctcaaggcagacaccatagaataattcataattctcaccattgggaaagttcacggaactttcccaacataatgaaaaagtgacgggaatcaatcccgccactttttctatgtatcagccacaaattgcctatggcactctgtgcatgtttactttttctgttttgcaagcatatttccctgcacgatctcaatgtaggcagcgataacgattacaatacctgttacgatgtactggtagaaggtatccactcccataaccacaagtcctactttcaaagcggagaacagcacagcaccgatcactgtaccgaaaatatttccacggccgcctgccatggaggtaccgccgatggctgctgctgcaatggcatccatttcatatccctgaccagtggaggggtcacctgtacccagtcttccgatcatgatcagagctgccaaagtagttcccagcattccgatgccgtacagaagagcttttgttctctcaacacgcacaccagataatcttgctgcgtcttcgtttccacccactgcataggcataggtaccaatcttcatctttttcagaacgaaggtgatgataacggcaaaaacaaagaatacaacaacagagaaggtgacaacagatgtaatcttaaagttaaacacatttctgtattcacgaggcacgttcagcaccgggaaacctccggtgataatgtatccaatacctctgtagatctgcatagtacccatggtggcaatgaaaggctgcagcttcataacgccaaccagaacaccattgatcacacccataatgaaaccaagaccgagacaaaccacgatccagatgggtatgggcattccggctttggcaagctgtgcacccacacaggccagcagagccagggaagaaccaacggaaagatcaatgcctcccgttatgatcacacaggtcataccaatacccataaggccgtaggtaactgactgtgttacaatcgttgcaatatttgttgctgataaataagaatgctccagcacgctgaacaggataatcgtaacaatcagcgcgatgagggcgctccactctctacgatactttttgtaaattgcattcatgacacatcctcctccacggtataattcagaatactttcctcagaaaattgactctttggaagctctccggaaatggttccatcccgcattacaagaatgcggtcactcatgcccataacttctgtcagttcggacgaaaccatgatgatcgcaacaccctcagctgccatcttttccatcaaaagataaatatctgcctttgcaccgatatcaattcctttggtaggctcatcgaaaatcattacaaacgcatctgttgacatccacctggccagaatgaccttctgggcatttcctccagaaaggctgacggtcatgaaggaaggatcattgggctttaaccctaccagtgtccctttttcttttgcgttttgattctttttgctttcatttataacaattccagacatatattttccaaggctggccagagcaatattgtccatattatcaaagtttggcatcactccctcttccttacggttttcggaaattaatgcgattccctgctcaattgcgtctcggggagatttacagtgaatttcttttccttttaacgttatcttgcctcccgtatggggatctgcgccaaagatcgcccgcatgacctccgtgcggccggctcctaccaagccgaagaatcccaggatctctcccggatacaattcaaagctgatattctcaaatgcttctccagttaatccttccaccttgagaacaggcacgtctccctttttctgacagggcatggtcctctttgcaaacagcgagatatcccggcctaccatggcctggatcacctcatctctggtggtcttgtccatttcaatcgtcttaataaactttccgtccctaagaactgtagagcggtcacacatacggaaaatttcattcattttatggctgatatataagatggtaattcctttttgtttcaaatcttcaataatcccaaacaatgtttctacttctttatcactgagtgatgaggtgggctcatcaaatgaaataacgctggcattcacctccagtgcttttgcaatggcgatcatctgtttttggccagcggacagatcgcccattctgtcagtgggcagaatatcacaattcaaacgctttaacagcgcagcagtatcctcattcattttgcgtttatcaacaattccaaatcgtcctggttcttttcccataaagagattttccgccacggtcatatccggaatactcacaatctcctgatggacctttgcaatgccggagtcaatggcatctgcaatgctggaaaatttaactgactttccgtttatacggatctccccggaagttgcggggaacactccatgaaggatgttcagcaaggtactttttccggctccattttcaccgatgatcgcgtgaatctctccctttcttatcgaaaagctgacatcgtccagagccttttgaccgggaaaggtcttcacaatatgctcaaattcgatgtatttatccatagatacacctccgttttaagttccgaaaacaaacttattaaaaatgggggcggacataccgccccccgctgtgttaaaaattattcaaaaataggtgcatagtcatatccaaagatttcttcaaaggatttgtctacgttttctgcatcacggatactctgaggagcatagataaccttgggaacttcctgtccagccagtttacggatctgcatttctacagcgatctcagccatcttgttggggaagaagtctacggttgcatccagttcgcctgctttgatagattcggttgcttcacttgttccgtctgttccaacgatcacacactcgctgtcagatgcgataactgcttccagagcgcccattgccattgtatcgttgttgcagtagataccagccaggtccggatactgctgaagcagagtctcggtaatgtcgtaagctttctgacggtcccagtcgccattctgaactgccactacttcaattttatctttgtcttcaaagaaatcgttaaagccctgtgtacgagcctgggctgctgttgcctgggagaggcctgtgatacatgcaacctttccttcttcgccgatcttgttatagatccactcagcgccctgaacgcctgcctgataatgccatgcacctacggttgtagttgcatatggtgtaaatgcgtccataacggttgtcaggtcgattcctttttcaatagctgcttccattcctggaaccaggtttgcttcggaaattccggataccagaacagcgttgtaatctttgtttaccatgtccataagaagggtcagctgtccttcttcatcagtctcagtctgagcgccacgtacatcaacggtcagcttatagcctgcatcctggaaatttttggctgctgcctcagcgccttctttttccatacgccagaactcattttcaaaggtcttggttgcaaagccgatggtcagttcgtcttcgatcttgggaactgcgcccagctcgtcccttatatcattataagaaactgcttccttataaaaatcatatccctcttctgctacgtctgcgctgggaaggtctgcgtccgctgcaaatgcggtaactcccatggatgcggtaagtgccaatactgctgttaatgcgatcatttttttcatattcatatcctcctgataattaatttgtggctgttacgtttttttggctgttacatttcttaaattattcgtgaaaacagaattcaccttctgtaaatttcagctctggaagaataccaggcttgttatcgcctacatatctctcagctgtaggtacggtaacggtaaattcaccctggagcagaccctcgtctgatttttccttgagcgtcactgtactttccacgtctgtgcctgatgatttctttgtaaaatagtagcctactgaggatttctcagagctcaccacttcaatctgtgtgatggcgtttttgtccatctctgtgccaacttccagggacttgttaaacacaacattcattgtgtattcatctgccttgaaggtataggtaacaccggtgatcccttttgttgatccatcgtattcaaactctacatcctgatcattgatcttggctgcaagccatccggttccctcctcgggatcgtagttccggtctgctgcctcctgagtctcttcagccgctgtatctgcttctgctgctgcgcttgcgctgaagctgctgcccatgatcatggttgtaaatgccaaagcgatgattaacttctttttcatcctgtacattcctcctgttattagaacttggtgccgtaaagatcagttacaaatgtccagaatgcatctctgtcaatattaaatacgatttgaacattcttagaggtgtaaggtcctttgccgctttcccatgttacagcatttgcatagctgtagctggtgctgttgcagtcaactgcaaggtctctgttttcggtctcggtgatcaggtctgggcagaggaagatccctgcggtgatagcatcccagcagtaatgggactgtgttgggttctcttcatagtctggatatacacgatccatgaaaagctgtgtgatcacagtgttgttcttatctttcatcatatcaaaaacatctttttcaaggggaaccttggaagcgatgtcatgaggaacaacgatctgatatgggaagtcattgcgcaggcagacctgtacagattccggatcatagaaccagttgaactcgccgcatgcgttagcatttccaggaacgtcgatagcgccgcccatgtagatgatacctgctgtgttctcagcaaaggtaggatccatcatacatgccagagcaacgtttgtacaagagccgatggcaaaaattgtaacttcaccagggttctcttttacggatttgatcatgaactctgctgcattcatatcggtctttgcttcggattcagaatagccccaggactcatccagaagctcgccaagatcatgataattctgaggctctacatacttgtcaagctctctgtagccgcctgtccactggaaaccgccggttaccggctgatcctcttccagattacggaagcccattatgggaacgtctgtgccgatataaaccggaatgtctgttctttcaatggcatccagctgtcttaagatcgcattggtaccagttgcacagatttcatttccgcctacagaagtaacacccagcaaatcaatccagccggcagcgtctgcctgcgccaggatgaacatacagtatgcatcatctcccagataccccatatcacagtctaaaataaccttgttgctctctgctgtagtagcaatttcgtagtcctccagcgcggcaaatgcagtagtgggtgcaaacatgcttcccaacattcctgctgccagtacaattgataatgcttttttcttcatcttttttcttactcctttctctttttgatatttcatataccggcctacatggctcgcacctggtaagccggctatatttcttgatctatccccggggcataaatgctatcccccaaataggtatttttatcgttcgctttttttactctacggttgttgtgagaatatcaacatagaaatcccagaaggcttctctgtcaatatcaaataaaactttacatttctgtacgccgtaaggcattccttcaccagtctccacgtctctgtttctggaggtccaccagctcactgcacgtccgtagtctggaccatagttggtgtcaacggtgagataacggtcctgaaggtctgttgcgatctcaggacggagccatatggctgctgtaatggaatcccatacatagctggaagcttccggattcttttcaaacctttccttctgtccatccacgataagcttggagatctcattgccctgtttctcaacgattctgtcataaacgtcctttgtatagaaaacttcttccgcaatatcgttgggaacgtcaatctggctcttccatggagaattcagacatacccggatcccttccggatcataataccagttgaattctgccgctgagctggagtttccggggatatccacagcgccgcccatgtagatcacgcctgctgcatcttccacaatgcttgggtccttgcgcacagcaagagccatgttggtgcctgcgccgatcacaaaaattgtaacttcgccaggatacttatgtacctgttcaatgataaaatcaatggcatgctcatcctgagcttctgtctgggcataaccatattgtggctctgacggaagattcttataatctgtgggacgctcatttacatcgcagaagtcactgtttccccaatcccagtaagctccgctgtattctggcataccccagatctgactctcggcttccatgttgcggaatcccataagcggtacgtcgcatccctgataaaccggtatgtcttcccgtccaataagctccagctgacgaagtgctgctgttgttccagatgctacccaggaatttcctcctacagtggtaactcccaggaaatcgcaatctccaaggctgtccgcctgtgccagcataaacataacaatagcgtcatcgttcagatatcccatgtctgtatccaggatcgcacgctttatccctgttgtctcctgtgttgtgtctgttgcttctgctgcggtatcagccgctgcatcctctgcatacactgctgcgggcagcaccattgaggctgccatgctggctgtaagagccagtgccaataatctttttttcatcctatccctcctgtttttttatttcagcttcggacggatccatccatctgatttaggccctttcctcagataaaggaatgttccgcagctgatctgtttttgagcgcagaaaattgtttcaaaacatttctattgtgctcatgaagtattatcattatgaccttttctagcattataatctgtgatataagtcaccgttatttgatttttttcaatttattttcagttattgcttctccagactttccttgacctctgtgacagagggtatagagcctgcggctcctggtctggatacagcgatggaagaagcctttgatgctatgcgcagcgcctcttgaatgtcttttccctcgatcagggaggccatgaagaaaccactgaaggtatctccggctgccgtggtatccactgctttcaccttgaagatctcctgatagactttttcttttccgtcatagtacacagaaccgttgcttcccagggtaaggacaaatcttgcatagggaaacttctccgccagactgtctaaaattttctccgggtctgaaaatccggtaaactgctcaccctcaatctcgttcaaaataaacaggtagattttagtaaggtcgcaggcatccagcttttcatcaaagggggaaggattcagcacgatcttcattcccatatggtaggctttgtcaataagatagtccagaaggttgatctcgttctggaggatcaggtaatccccctgggtaaagttggacaacacctcatcaatatactccttggtctgcatctgatttgtcccgccgtagaggataatgctgttctggccgttcttatccacctggatcaccgtgtggccgcctttctccggaagtgtgcggatataggtggtatccaccccatattttatgcaggtatccagaaggagctggccttcctctccaataagtcctgcatggtacacggctacccctgccctggcaagagcgatggactgatttaatccctttcctccgcaaaaggtctcttccttataagaaaggatcgtctctcccccctgtacaatatggtccacggagtaaacgttgtctatatttaaagaaccaaaatttagaaccttcatctcatacctcctcgtaattaaagtgtagacttgtatagtcattttaaccgaaagtaccccttccaaactgtgattataatcacaattcaccaaattttcctctgaagctttcctggacacatggtgtgcaaaatttctttacacaacagaaaagccccggaaaccttacggttccggggcaatcttatgcttggacacaatgatatcaaagatatcaatttctatgatcaattgtcaatgaataattattcgataacggtagcaacacggcctgatccaacagtacgtccgccttcacggatagcgaaggtaagaccctgagccatagcgattgggtggatcagttcgatggtcatctcgatgttgtcgccaggcatgcacatttcagtgccttctggtaagttgataacaccagtaacgtctgttgttctgaagtagaactgaggacgatagttgttgaagaatggagtatgacggccaccttcatctttggtcagaacgtatacctgagcggtaaatttggtatggcaggtaatgctgcctggttttgcgagaacctgtcctctttcgatttcgtttctctgaacaccacgaagcagagcaccaatgttgtcaccagcctgagcctcatccagtaatttacggaacatttcgataccagttacaacaactttacggctttcttctttcagaccaacgatctcaacttcttcagatacgtgaagaacaccagcttctactctaccagtagcaacggtaccacgtccggtgatggagaatacgtcctcaacaggcatgatgaaaggcttgtctgtgtcacgctgtggatccggaatgtactcgtcaacagcatgcatcagctcgatgatcttgtcgccccactcgctgcttggatcttccagagctttcagagcggatccctggattacaggaatgtcatctcccgggaattcgtactcgcttaacagctcacgaatttccatttcaaccagttccagtaactcttcgtcgtcaaccatatcacatttgttcatgaatacaacgatataaggaacacctacctgacgggacagaaggatatgctcttttgtctgagccataacaccatcagtagcagctacaacaaggatagcgccatccatctgagcagcaccagtgatcatgttcttaacgtagtcagcatgtcctgggcagtcaacgtgtgcgtaatgtctgttctcggtctcatattcaacgtgtgcagtagagattgtgattccacgttctctttcttccggagctttgtcgatattatcaaatgcaacttcctctccaagacctaatcttgcatgaagagttttggtgatagctgctgttaaagtggttttaccatggtcaacgtggccgatggtaccaatgttacaatgcggttttgttctctcaaacttagcttttgccattttaagcgtcctccttgaaactttggccctttcaatctgggcatatttttagttttcgatataaacttgctatccttgattatattgcaaatcaaggatatttgcaagtattttatttcttataaaatcagttaagatcagtctttcttggacagaatcttctcctgtacagacttgggaactggctcatatttctcaaagaacatcgagtagttaccacgtccctgtgttctggaacgtaagtctgttgcatatccgaacatctcagacagtggaacgaatccacggatcatcttgcctccgccgatatcatccataccttcgatacgtccgcggcgggagttgatatcgccgatcacatcacccatgtagtcttctggagtggtaacctcaactctcatgatcggctcaagaagaatgggagctgccttgcgcatagcatccttaaatgcaagagaacctgcaatgtggaatgccatctcagaagagtcgacttcatggtaagaaccatcgtatacatttgcatgaatacccacaaccgggaagccgccaaggataccggccttcatggcctcctcgataccttcgcctactgcagggatgtattccttgggaattgcaccgcccacaactgtggattcaaatttgtaaagctcttctccattggcgtccataggtgcaaatttaaccttacaatgaccatactggccacgtccgccggactgttttgcatatttgctgtcaacttccacattcttggtaatggtctctttgtaagcaacctgaggtgcgcctacattggcctctaccttaaattcacgaagaagacggtcaacgatgatctccagatggagctcacccatacctgcgataatggtctggccggtttcatgatctgtatgagcacggaaggtgggatcctcttcagcaagttttgccaaagcttcacctaacttgccctgacctgccttggtcttaggctcgattgccagctcaataactggttccgggaattccatggattccaggattaccggatgctggtcatcacagatggtatcaccggtagtactgaatttgaagccgatagcggctgcaatgtcaccggaatatactttgtctaattccatacgtttgttggcatgcatctgaaggatacgtccaacacgctcttttttgttttttgtggcattaagcacataggaaccggagttcatgcttccggagtatacgcggaaatatgccagcttaccaacaaaggggtctgtcatgatcttaaataccaatgcagagaaaggttcttcatcagaagaatgtctctctacttcattgccttcgggatctgtacccttgatggctgcaatgtctgtaggagccggcatgtactccagaactgcatccagaagcttctggacgcccttgtttctatatgcagaaccgcagcataccggaacggctgtacattcacaggtagccttgcgcagagctgctttcattgcctcaacagaaggctcttcaccttccagatattccatcattaagtcgtcatccaactcgcagattttctcaattaattcggtgcggtagagttcagcgtcatctttcatgtcgtccggaatttcggttattgaaacatcttcacccttgtcgtcattatagatatatgccttcatttcaaataagtccacaattcccttgaactcatcttccttaccgattggcagctgcagacagatcgcattttttcccagacgggttttgatctgctctacggcgccgtagaagtttgcacccaggatgtccattttattaataaatgccatacggggtacgttgtaggtatcagcctgacgccatacgttctcagactgaggttctacaccaccctttgcacagaagacaccgacagcgccgtccagtacgcggagtgaacgctcaacctccactgtgaaatcaacgtgtcccggagtatcgataatattgatacgatgctccagagcacctggtttcacctgcatttcatcatgcagggtccaatgacaggttgtagcggctgaagtgatggtgataccacgttcctgctcctgttccatccagtccatggtagcagttccttcgtgagtatctccaattttatagttaacaccagtataatagaggatacgttcggtaagagttgtcttaccggcatcaatatgcgccataataccaatgtttctggttctctctaatggatattctcttccagccaatggatttttcctcctaaacgatttacagtggcttataacccaagattagaagcgatagtgagaaaatgccttgtttgcttctgccatcttgtgcatgtcttctttcttcttaacagatgcaccagtgttgttcattgcatccaagagctcatttgccagtctttcttccatggtcttctcgcctcttttacgagaatacagagtaagccagcgaagagccagagcctgacgtctgtctggtcttacttcgataggcacctgataggtggcaccaccgatacgtcttgcttttacttccaactgaggcataatattgttcattgcctcttcaaatacttcaacagctggcttgccagctttttcttcgattctggtgaatgcgccatatacaatcttctgtgcgacacccttcttaccatctaacatgatgttattgataagcttggtaaccactttgttgttgtacatgggatctgccagaacgtctcttttctgagtatgtcctttacgtggcacgttacttccctccttaatcactatgattatatcatcggtactcacttcagaaactaaggtgttcgcactggtaaagtcctatatttaacccgcaaccgacagggtatatggaataccgtacaaatttatagtcattcgtgattcttcgatcgatacagatataaaacagttttatttcttaactttcggtctcttagcaccgtatttagagcgggcctgctttctgttggctacgcctgcggtgtcaagagtaccacggataatatgatatctggtacctggcaagtccttaacacggccgccacggataagaacaacactatgctcctgaaggttgtggccttctcctgggatatagcttgttacttcgattccgttggaaagacgaactctggcgatttttctaagagctgagttaggcttcttaggtgttgcagtcttaacagcagtacaaacacctctcttctgtggagaagactggttgatcgctttctttctcagagagttatagctcttctgtaaagctggtgctgtagattttacaacagatgtctggcgtccttttcttactaactggttgaatgttggcattccatttcacctcccgattatttctccatggctgtgccatggggttctgcggttgctattccatagaattgtacacgaaaaagctgtgctttccatgcacgcttgcttattatatcctctagaaaacaggctgtcaagggatttctcctggatttttgctcttttttttatatttttaaacaatttttaacctgttcacagcatatctgctgtgatgggaaggctggtcaatctccactggccgttctcgcttgtgtacactgcctgaagctggatatcaaattctttttcgtcattggcaagggcattgatctcctctgacatgtagataaaacgctccttcacatgtccccccatggtgacgatcatgtcattctcttcattttccttgtacgccccttctttggcggccagggattcctcaagaccagtgatctccacccaggtaattccttcttctcctccgctgctggcagaattctttaattcattaaaggcctgctggatactgccgtcttttaaggcttccccggaaaagtgttcgctgatggttccgaaacttttcttagtgagggctgcctccaggatcttctgcacgtcctgtcctgccttttccagcagattatcctgggttcctgactctggcataagctggactactgttttctgctcatcctttttcacaaaaagattcctcttgtaggtttccattccttccatagatacttccatctgatagctccctcgaaaaaggtaaggaatggcaaagctctgccagcttccctccggcttgcgctccaccacgatctctgtagcgttcagcttcatggaagcccctttgggaatggtaaagccgatatctctggaaatatatatcctggggctcaccttccattggtcaaaaaataacagcttcttccctgtacgtacaagggtgatggcctgtcccgctgtcttttgatctgcagtttttgtaaaactggcaccatagcttttggtgaggggctgctcaccgttaaggagctcatagtcctgggcctttgtttcctgatctgcctcataaaactcataggagctgtatacagtacggtcgttgtcattccgccttgcattgataaacatttttttcgacagggaagaggtcttaggcacattgagcagatcgtacaccacgttccagtccttgtccataaatgcctgacaatatttatccacaaccctctccgggctgctgagcctgcttccacaaatatagaaaacaatccccaagaaaagcagcagcaccagctccacacctgcgaaaatggttaccgtccccactctttttcttcgtcttctttgtttttccatgctctgtcctcctttaccagccctgcgccgtacggtagctgctgatgactcccacattggatgcctcgatatctgaaaactccgccagaacagccgcctcatccttctttgtcatagactgataccaggacttagagttaaagtattcgtaatctgaactgttctcattggcgtggaattcatatccgtggcgggcaaagatctcattgatggctctctgacaggaggccgcatctgtgagccgggacaagtcctcttgtgtgagcactctgctgtcgctgtctggaaaaataaaatctccagaggacatccctgtatcaccctgtccttctccctgttcaggtgccccagtgggggacaccaccggagtaggtgatggtagaggcgtgggggacggacttggggtaggagtgggggacggagctactgctcctgagcctgccttgatctgccctgtgtacagcgctgaggagctgcctgcgtaagtgtccgcattcgcctgaaattctgtgtccacctggggcgtgatgaactccgtctcttcctgccacaggaaaaagctggcgatcccaatgcccacaagcacacaggccgcccccagcacaatggccgcaatagtcattccaatggggttctttttctttctccttctctcattgggtgtttcccgcatgtttgtttcccctttcttcttgtattcccctcaaagtcttttattttctcgtcttctgccatcctcttttttagaatttgacagatgtgtaatagttattatagcaaaatccctgaagaaattacagcttttttacaaaaatgttactaaaaagccacccacatcaaatttaagtagctgctaaacgccaagaagaggatgaacacaggttcatcctcttccttcccactgaacagggtcagcttttcgtatttgtattattcttccaaatcactttcttcagcttctgcttccacatcctctaaatccagatcgtccagctcatcggaaagctctgcctcgtcctccagctcatctgccagatccagaatctcctcaactggctcctcttcctcaaaaacctcatcagttacaggaataggatcagccgtgttcagtctcacatcactgtagcgcttcagtcctgtaccagccgggatcagcttaccaataagaacattctccttcaagccgatcagcgggtcaaccttgcccttgatggccgcctctgtaagaaccttggtggtctcctggaaggaggctgctgacaggaaggaattggtggccagagatgccttggtaataccaagcattacctgcttgccttctgcaggctcttttccttcttcctctaactgctcattgacctcttcataatccagaacatctaccagtgttcccggaaggaactctgtatccccattgttttcaatgcggatcttcttcagcatctgacgcacaatcacctcaatatgcttatcgttgatctccacaccctggagacggtatacacgctgtacttcctggatcatataatcctgtacggcacgcacacctttgatcctcaggatatcatgaggattcacactaccctctgtgagctcatcaccggcctccagatactgtccgtccataaccttaatacgggaaccgtatgggatcaggtatgtcttggaatcaccggtctctggatccgttacaatgatctcacgtttcttcttcgtatcattcagggtagcaatgcccttaatctctgtgatgatggccagaccttttggctttctggcctcaaaaagctcctccacacggggaagaccttgggtgatgtcaccgccggccacaccgccggtatggaaggtacgcatggtaagctgagtaccaggctctccaatggactgtgccgcgataataccaacggactctcccacctgtacagactcgccagttgccatgttggcgccgtaacattttgcacaaataccaaccttacatttacaggtaagaatggtcctgatcttaacttttgtgatctcaccgccatcttcgttgttcacaccctcattcataatgcgggctgcacggcgtggtgtgatcatatggtttgctttgacgatcacttcaccgtttttactcttaatggtctcacaggaatatcttcctgtaatacgctcctgaagactttcaatctcttccttgccgtcagtaaaggcttttacaaacatgccggggatcatgtcttttccttcacagcagtctgcctcccggacgatcagctcctgggacacatccacaagccgtcgggtcaggtaaccagagtcagcggtacgaagagccgtatcggacagacctttacgggctccatgggctgacatgaagtactccaatacatcaagcccttcacggaaattagatttaataggaagctcgatggtatgtccggtggtatctgccatcaaaccacgcatgccggcaagctgtttgatctgcttgtcagaaccacgggctccggagtcagccatcatataaatgttgttatacttatccagaccgcccagcagagccttagtcagctcatcatcggttttcttccaggtatccacaacctctttgtatcgctcttcctctgtgatcagaccacgtttgaagttcttggtgatcaagtccaccgtatcctgggcctgtttgatcagctccggcttctgaggaggtacggtcatatcagaaatggaaacagtcattgccgcccgggtggaatatttatatcccattgctttaatggagtccagtacctctgcggttttggtcgccccatgggtgttgatgactttttccagaatttgtttcagctgtttctttccaaccaggaagtcaatctccagaaggagttcatttccttccacacttctgtccacaaaccccagatcctggggaaggatctcgttaaagagaaaacgtcccagagtggattccacatttccggtaatctccgttccgtctgccatggttctggtacagcgcaccttgatcctggactgaagggtgatcgctttattttcataagctaatatggcttcattcacgctcttgaagcatttgccttcccctttatttccaggtctttcctgggtcaggtaataaatgccaaggaccatatcctgggaaggaaccgccacaggaccgccatcggaaggcttcagcaggttgtttggcgacagaagaaggaaacggcactctgcctgagcttccacggaaagaggaagatgcacagccatctggtcaccgtcaaagtctgcattaaatgcagtacaaacaaggggatgcagcttaatggccttaccttctacaaggataggctcaaaagcctggatacccagacggtgaagagtaggtgcacggttcagcataaccggatgctccttgatgacatcttccagcacatcccatacttccggctgaagcttttctaccatcttcttggcattttttatattgtgagaggttccgttggccaccagctccttcattacaaagggcttaaacagctcaatggccatctccttgggcagaccgcactgatagatcttcagttcaggtcccaccacgataacggaacgtccggagtagtcaacacgtttacccagcaggttctgacggaaacgtccggattttcccttcagcatgtctgacaaggatttcaaggctctgtttccagggcctgtgaccggacggcctctccggccgttgtcgataagggcatccactgcttcctggagcatacgtttctcgttgcgcacaataatatccggtgctcccagctccagaagacgtttcagacggttgtttcggttgatgatccttctatatagatcattcaggtcagaggtggcaaaacgtccaccatccagctgaaccataggacgaagatctggcgggatcacaggaactacggtcatgatcatccattccgggcggttgccggattcacggaaggattccacaacctccagtctcttgataatacgtgcccgcttctgtcctgtggattccttcaggccttttttcagctccacggattccttctccaggtcaatggcctccagaagctccttgatggcttctgcgcccatacccacacggaaatcctctccgtaggcttctctggcatcctggtactctttttcagtgagcacctgtttgtactgaaggttggcctctgcagggtccagaacaatataattggcaaaatacagaaccttctccaaggttcttggagatagatccaggatcaatcccatacgggaagggattcctttaaaataccagatatgagacacaggagcagcaagctcaatgtgtcccatacgctccctgcggacagatgctttggtcacttccacgccgcatcggtcacagacaacgcctttataacgaattttcttatattttccgcagtgacactcccagtccttgcttggtccgaaaatccgctcgcagaaaagtccgtccttttccggtttcaatgttctatagttaatggtctctggttttaaaacctcgcctcttgaccactctctgattttctctggggaggccaacccaattttgatggcatcgaaagtcattggctgatacgtttcatttgtagtggttgcttctgccatgtattctttcccctttctactcttcgtcgagagattcctcgaattctgcaaaatcgtcttctacttcttcgtcctcagtcacatccacaagctcttccccttcaaattcctgcttggtatagccatgctttccaaaggattcttcttctctgcggtttctggaatctccctcgatcacagaacgcagatcggtatctccataatctatactttccataatctccacttccgtctggtcttcccttaaaaccttcacatccagacacagggactggagctctttgagaagtaccttgaaggattcgggaattcccggctcagggatattgtcacccttgatgatcgcttcataggtttttacacggcccaccacatcatcagacttcacggtaaggatctcctgaagtgtgtaagatgcgccataggcctccaatgcccaaacctccatctctccaaaacgctggccgccgaactgagcttttccgcccagaggctgctgagtcaccagggagtatgggcctgtggaacgtgcgtggatcttgtcatctaccagatgatgcagcttcaggtaatgcatgtgtccaatggttaccgggctgtcaaaatattctccggtacgtccgtcacgaagtctcaccttgccgtctctggaaatgggcacacccttccaaagggctctgtgtgccttgttttcatccagatactgcataacatccggtgccaggatatcctggtattttgcacggaactcttcaaaatcttcgatatttacatagtcatttgccagctcaagagtatcctggatatcatcctcgtttgcgccgtcaaagacaggagttgcaatgttaaagcccaaagcctttgctgccagacttaagtggatctccagcacctgtccgatgttcatacgggaaggcacacctaaggggttcagcacaatgtccaggggacggccatttggcaggaagggcatatcctcaacaggaagcacacgggatacaacacccttgtttccgtgacgtccggccattttgtcacctacggaaatctttctcttctgggcaatatatattcttacagactggttcaccccaggagacagctcgtcgccggcttctctggtgaacaccttggcatctaccacaataccatattctccgtggggaaccttcagggaggtatctctcacctcacgtgccttctcaccgaaaatggcccggagcagacgctcctctgcggtgagctcagtctctcccttgggagtaacttttcccaccaggatatcacctgcacgtacttctgcaccaatgcggatgatccctctctcgtccaaatccttcagggcatcatcacccacaccgggaacgtctctggtgatctcctctggtcccagcttggtatcacgggactctacctcatactcctcaatatggacagaggtatagacatcatcctgaaccagtttctcgctgagcaaaacggcatcctcgtagttgtagccttcccaggtcatgaatccgatcaggggattcttgcccagtgccagttctccgtttgaggtggaggggccatcggcgatcacctgtccggcttctacatgctcgccctggaatacaatgggccgctggttgtagcagttgctctggttacttctcagaaactttgtcaaatggtaatcatccttggttccatcatcgtttttgatggaaatatccgtggatgtggaacgcagtaccgtacctgccttcttggacacaatacatacaccggagtcaacggctgtctttgtctccataccagttcccactacaggagcctgggtggtgagcagaggcactgcctgacgctgcatgttggaacccataagggcacggttggcatcgtcattctgaaggaaagggatcaaagccgtagccacggaaaataccatcttaggagatacgtccatgtagtcaaacatgcttctctcatattcctgagtctcttcacggtaacggccggaaacattcttatgaataaagtacccgttctcatccaggggctcgttggcctgtgcaacatggtagacatcttcctcatcggcagtcatatagataacttcgtctgttacacggggattcttagggtctgttttgtcaattttacggtacggagcctccacaaagccgtactggttaatacgggcataggaagccagggagttgatcagaccaatgttgggaccttcaggagtctcgatggggcacatacgtccgtaatgggagtaatgtacgtctcgaacctcgaatccggctctgtctcgggacagaccgccagggcccaatgcagagagacgtctcttatgggtcagctctccaaggggattgttctggtccatgaactgagacagctgggaggaaccaaagaattccttcacggctgctgtcacaggcttgatattgatcagggactggggagaaatattctccatatcctgagtggtcattctctcccggaccactctctccaatctggaaagaccgatacggtactggttctgaagcagctcgcctacagaacggatacgacggtttcctaaatggtcaatgtcatcgtcatttccaagtccatattccagatgcatattgtagttaatggaagctaaaatatcctctttggtgatatgctttgggatcaaatcatggatatcccggcgcacggcagccttgatatcctccaaatcggtattttcttccagaattttttcaagcacagggtaatatactaactctgtaacacccagctccttgggatcctggatctcaggaacaaagtgtgagaagtccaccatcatgctggagagaaccttgatattgcgctcttctccctccatagcgatccatacaaagggtacggccgcattctggatggcatctgccagctcctgtgtgatcttggtcccagcctctgctatgatctctccggttgtggcatccaccacatcctcagccagcttctggcctgtaatacggttgcgcagaagaagcttcttattaaatttataacgtccaaccttagccagatcatatcttctcgggtcgaagaacatactcatgatcaggctctctgcgctctccactgcaagaggctcaccgggacggatcttcttatacaattcaagcagaccttcctggtaatttgtggctgtatcctttccaaagctggccagaatcttaggctcttcgccgaacagctccacgatctccgcgttggtaccaatacccagggcacggatcaacacagtgatgggaacctttctggttctgtccacacgtacataaaatacatcgttggagtcggtttcatactccagccatgcaccacggttggggatcacggtacaggaatataactttttaccagttttgtcatgggcaattccataatagattccaggggaacgaactaactggctgacgataacacgttccgcaccgttgatgacgaacgtgccggtggcagtcattaatggcagatctcccatgaaaatctcatgttcattgatttcctcggtttctttattgattaacctaacccggaccttcaaaggtgcagcataggtcacatcacgttctttacactgttcgatggtatattttgcatccttctcgtcaaacgtaaagtcaatgaactctaagcttaacttaccgccgtagtccgagattggagaaatatcatcaaatacttctttcaatccttcgtcaagaaaccactgataggagtctttctggacctcgatcaggtttggcatttccaggacttctttttggcgctggtagctcatacgcatgctttttccagtttttacagaacgaattctgtttttttccattgacgtttcacccctgtttttattttatttattaccgcatcagctttctcttgtcacagtgtagtcacagagtaggcatatatagccataatatagcattctttaatgtaacacatgcttgtcaacctgtcaatattattttcggaatttcttccaatttttccgtgtaatatttatgcaaaaaatcagaaggaatttttaattgaatgaaaaaggtgcctgcccccagagggtttttgtataccaggaaattccctgggtatttcctggtatacaaaaacaggaacgcctccaagggcgttcctgtatcatctgcagtaagtaaattatttaagtgtaactttagcgccttctgcttccagttttgctttaagatcttctgcttctgctttggatgcagcttctttaacaaccttaggagctccgtcaacgactgctttggcttctttcagacctaagccggtaacttcacgaacaactttgatgactttaactttgtttggtccaacttctgtcagctctacgtcaaactcatccttctcttctactgcttctgctgcgcctgctgctgcaactacaacgcctgctgctgcggatacgccaaactcttcttcacaagcttttactaaatcatttaactctaatacggtcatttctttgattgccgcaataaattcttcggtggtaaattttgccatttctaattcctccattttcattattttttatttgagattcaaaaatcgttccgtgatctctgcttattcagcagcaactgcttctccgccgtttttctcagcgatctgattaagcacacgagccaggttgctaatgggtgactgcatacttccaagcagttttccaatgagttcttctctggatggaatgcttgcaagagcctccacacctgccttgtcattgtagtttccttccacaataccagcaacaaattccagtgccggatactgctttgcatatttagccagaattctcgcaggagcagttgcatcgtcggcagatactgccaatgcatttgttccatttaagtgttcgcagagaggctcacatgcagttcccttgaatgcaaggttcatcatagtgtttttgtaaactttataatgaacgccagcttccctgagttctttacgaagaatggtatcctgctctactgtcagtccgctgtactttacaagtactacagattccgcatccttcacgcagtttgcgatctcttccacgatcggctgtttaagttctacttttgccatgaaatggtacacctccttatagatttataccgccgcatacaaataagaaaaaggtcttactctacaagacagtaagacctctgatatctctcatcagaactaatgtcctcggtaggcgttttgatccttatgccttacggcacctactgtcttcggcagcgttctgtacaaatttagcatgttttcaattaactgtcaagtatgaatttcatatttaacagcgaattagtatgaatttcatatttaacagcgaatttttgcccgaaacgtataatttcttatttcgttccaaagatccggtctcccgcatccccaagtcccggacaaatataggcgttctcattgaggcaccggtccacatttcccacatagatctgaatgtccgggtgctcctggtgaagcttttccagaccctccggggccgcaatgatgcacatgaacttaatgttcttgcagttcttcgccttgataaaatccacagcctccacagcagagcctcctgtggccagcatgggatctgtcaccaccacgatcctctcatccacagattccggcagcttgcagtaatattcatgaggcttatgggtcaccggatcccggtaaagtcccacatgtcccacttttgcagagggcaccagggtgagcaggccgctgaccatacccagccctgccctaagaatgggcacaatggccagcttcttcccggagagcataggtgtcatgcaggtctccagaggcgtggttacctgtacatcctccagaggcaggtccctgagggcctcatagcccataagcactgcgatctcatccaccagcttacgaaattcattggttcctgttctctcatctctgagcatggatattttatgcttgatcagagggtgttccataatgtatacgttttccatcttctcttcctcactcctgtatagttttctgtttccattgcttcaaggcctggtcataggccgcctttgtaagatcattaaagcagaccatggtcacctcttccactgtatgagaattttccagaaatcccataatggcatccacggcgatggccgccgcctcctttaatggaaaatggtaaaccccggtgctgatagagggaaaagccacggtccggcacctgtactcatgggccagcttcaggcagttctcataggaagccctcagaaggtcagcctccccgtgactgcctccccgccacacaggacccggtgtatgaagaatgtattttgccttcagccggtaacccttggtaatcttcgcctggccggtactgcagcctcccaggcccctgcattcctccaaaagctccggtccggcagccctgtggatggctccgtccactccgcctcctcccagcagggacgtattagccgcattggcaatggcgtctgtcccataagtggtaatatcccccttttcaattttcaagattcccatttttatccctccagatgacgttttgtaataacgtttcttctatattataatatataatctgtcctctgtgccgtcaacactattctatcctgcaaagaaggatccattgcacacagctgtttacatcccccctgaaatgtgttaagatacttttcatgaaaagagggaattcataatgaaggtacattggaataaaaacatccgaagctgccagactaaacttcatattccttgtagaacccagactgctccttaggcagtctgtttttttgtgctttatcctgctaacatgacaatcaaacaaagaaagaaggtatcttatgtcacaaacaacacagccctggaagcctgttgccaacctgcttctgatccttctggggaataccatctataccctgggggtggtggccttcctcctgcccaaccagatcatcactgggggaaccaccggactggccctgtccgcccagcattacctgggaattcccatctccgtgtttgcctttttgtttaacatggttatgttcctggtgggtcttgccatccttggaaaaaagtttgccctcaccaccttggtgagcaccttttattatcccatctgcctggatgttctgcagaaaatcccccttctttcagacatcacccaggatcatatgctggccaccttatgtgccggtgctctgatcggggctggtattgggatcgtgatccgggccggcgcttccacaggaggcatggatatccctcctttggtcctgaggaaaaagctggggatccccgtgtctgtatctctgtatgtatttgactttataatcctcctggtgcagatgaccttttccaataaggagcagatcctctacggaatcctgctggtctttacctacacctttgttctggacaaaatgctggtcttaggtttggcccagacccaggcaaagatcatcagccccaagtactcccagatcaacgacgccattatccgtgaactggacagaggctccactctgatccatggggaaaccggatatcttcatactgtacagcccatagtgctcacagtggtctccaaccgggagctcattcgtctgaaccagctggtgatggacattgatccaaaggcctttatgatcatcagcaaagtcaatgaggtaaaaggcatgggcttctccatgcccaaggttcatcaaaatactctgtaatttatctagaagggtccggcaaaaaagccgggctctttttacatttgtctgcgcacaatccggtattcatcccccatctgaaaataaggacagttggaaaaggtattggtcacgaaccgctgcatttcatcctcgtccagattcacttcacagatatagcattcataggcctcatcatatacataattggcacaatattcacacttggacgttcccttcattttacaggtttctcctttcttcgtttctgcttttttccatcccccttgcccccatggggcaaaaaaagagtctgtctttcaggtcagttattctgtcttttgtgcagaatccattgttattttccaataatgtcttataatagaaaacaacacaagtacttgttataaattttcattcaagagttccccagagggactcccaccccggagggcggccgccttgaacatccggaaccatataggaaaaagagaggtgtctattatgtataagaattccagtatcaacaaaatttctcccctgcttctggctatggttatggccgtatccatactattcacagcctgcggtcccaaaaagctggctggggattataaggaagacaagattgtggaggatacccagaaatatatcactgccttcctcaatgaggattaccagaccgtcatcgatgctttccctgccaatcttcaggctgggcttaccaaagatgcatttgcccagggcttccagatggcagccgcaaagggggaatttgattccttcggaaaacatgtaatttccaccaagcatattgaccaagtagatgaggattgggcttttattgtaataactgccaaatttaaggacggagacctgcagttcagcgcaagctacaatccccagatggaactgacgaatttcttcgtgaaataggctttggggcagtctcagaccatctctgccgcccctcatgagacagcaggaggagacattcatgaaaattgccgtgtgcgatgatgacaatctatttatagatcagatgaaggaatggctggcccagttcacagaaattccctgccaatattttttcttttcagacggcagggagtttcttcatgcgaaagaagtctttgacctggtatttctggatattgatatgccgggaacagacgggatcgccacagccagggcccttcgcaaggaagataaaaacatcaagatcgtgtatctcaccagctatacagattatctgtccgccgccttctctgtacatgccttttcttatctggtaaaacctgtgaaaaaggaagagatattccggcagattaaggaagcctgtgactaccgcccggaaatgatgccccaggacattttagagtttcaggccatggatggaatctaccggcttccctgtgaggaaatttattattttgagtatgtatcccggaaagtccgggttattacagcaaaaggatctttttacctgaaggagaagatcacatctgtgggggagaaaatgcaggactaccattttgcctctcctcacaaaagctttgtggtaaatctctatcatgtaaaatccattaagggatatgacatcgccatgacaaacggggactggatccccctgtctcagaaacagtccgctggctttcgcagacagttaaatacctatctggcccagcggatagaacggaggttttcatgagcagcttttttacggaacaacagtttctaaattgctttgccattttagatggcgctgtgtgcagtcttgtcttattttattttcttaagcacatgaacggacctttacaagtaaagcccaaattccggcttctggcttatgtaagcctggtactgctctccaccctttccttacaaaatgcactcctgaatagcatggttcttttggtttattatccttttttaggcgttgtgttgtacaaacagaatagaaaacaggctgccgtaagcttgatctactctctgagctttgtgctttgtacctggctttctatttttctgtattctatatttttcacctatttcccgaatctctatccttcggacccatatatggctaacattcttcttgttgttaataaatggtttgtattttttattgccacacagctcattatcctgctttttaggcggaacagagaaaaaactccctttagcatttaccagtttctctccatccttcttctgtccgcgggaagctatgtgatctttgccatttcctctatgatgtatgggacgtacagcttcctttctgatgacggaccttttttatatgtgctgctccttcttttgttgatttttataaatctgtattttatctactatgcccagaccatctccaaaaacaatcaattgagcagggaggtctctttgtacaggcagcaaagtaaaatgcagatggagcactacagacagctggaggaaaaataccagggctccagaaagatcattcacgacatccgcaaccacctgaattccatcgcctccttgtatgagtctggaaaaaaccaggaggccgcccagtatattgaggatatccacgggcttttgaaccgcatgggacagaaattttataccagccatgaaatgctgaacatcattctcaacgacaagctgggatacgcacagcatttgggaatccgcacagaagctgtcatctcccaggcagaactagatcagttccgggatattgacctgacctccatcttctccaatttgctggacaacagcatcgcggctgcctctctgtgcaaggagaacccttttataaccattaccattgaccagatccatgattttctcatagttgttattaagaattccctgtctgcccaggcccagctttccggctatactcccggaaccggactaaaaagtgtggcagaagccttaaaatcttataatggaagcatggacattcacatggaaaatggtgtcttccaggtgaccctgtctgtacctgtaaataaccccagtcactgatcataataaggaggtgccttatgtttggttttatcattttaatgctcgtttgttttctggttccccttggagccatggtatattttgtccgtcaaagaaacagcttcggccgctgtttcttcaccggtatgggtgtattttttctgtttcagatcctactgcgtcttcctattatcagcggcatcctttcccataccttctggtacaatgccctggcactgaaatatccctttcttcagatcctgctcctggcatccaccgccggactgttcgaggagggcggccgctatctgggttttctcaccctgccaaaaaaacctcttacctggaagcatgcccttgcctttgggctgggacacggaggtatggaggccttgtatctgggactgaatgtggccctcagctacttctccggcatccgcggagatacctctgcctatttgttaagcgccctggagcgttcctctgccatgtgcattcagattggtttcacatttctggtgttctacagcatccggaagaaaaaacctctgtttttacttttggcgttcctgttccacacctttgtggattccctcatcgcccttggcccctacgtgggagccctggcacttgaaggtatcaccgccgtggccggcctggccgcccttgccggagcccttaaggctgccagaagtatttccttggaataaaatgaagccggcagaagcgctccaaggccggcttataagagatgaccgtgccaagagggagtccagtctcatttcaggagcagtctcatatcgtaccactgggcccctccgtgacaggaatcggagattccatatttcacaaagcctcttctctcatagtaatggatcatatgctccttacaggtgaggatcacccctgcctttcccctctctctggccatttgtacaaacgtatccaccaatttttctgcaatgcctctgcgccggaaggagggaatcacattcaggccaaacacggtctgataagccccgtcaggcttatgtaaacttatatcatggtaaaattcatcgggcagatagggctggtctgtggttcctccattaataaatcccacaagctttccttctgtctctgcagccaggaaattttctggaaaggtctccattcttgttcggatctcttctcttgaggcagcctctgccggggggaaacactctgcctcaatctctgccagacggtctgcctcctggggccttgccaatcgaatcactacttccattcttctgtctcctttgtgttttttacaaatacatattctctgtctgtggaaagctcctcacaaaagctgtaatccagacggtcaaatgcctttaacgcagagaattcctgcacttccttctcagccataaagcgcaccatctcaccccgggccatttttgcctgggtacccttctggatcacttttgcccccttccgctccccgaaaatgcaggtgagaatctcatcctcaggccctgcataggcttctatacatttggaatactctttcgatgccaagtttaccagcttgtgttcccggcccataacctcctgatagattttgtccgaccagaactcatacagatcctgcactccctctgcctttaccttggcctgcatctccaaccgatagggaaccacaccgtccagaggctttaccacaccgtaaaaaccggacagaatccgcagatgctcctgtacatagtcccactccttctgtgaaaagactcccggggccatatactgatactggatcccctcataggagatcagcgccggggtgagatttttcctaaggtccatgctctgaaatctcccataatttaatgctgccagcttctcattacaaccccaaagcttcctggcctcctcacaggaaagccccctcacccagtccagaagcttctgggtttcctccagaaagggagggagcccctcccaggaaaaagtgtctgtgtccacattcattttcttggcgggggaaatgatgatcttcatcctttttcatcctcgtagacaggaagctccaccacctgataatcatggtgcacagccggcagcaccttctctatcacctctgcagttttcagggccaggctggaggtgttgatgcagggatgacagccaaaccattcttcctccaggacctccttgtcaatgagaagccgcacctgatcctccttgtcattcatcagacccattacacttacagagcccggagtgatgttcaaaagccgctccatagactctgcatctgcaaaggacagacgggcgcttccgatctgtttggacagatcctttgtcttaaagggcttgtccccaggcatgaggagcaaataaaaatctgtcttctgccggttgcacaaaaacagatttttgcaaattttaattcccagcagcatgtctactgcctggcaggcctcaatggtcatcaatgcctcatgatccactcttttgtaggaaatctccaggctgtccagcagatcatacacagccaactccttgagcagacgtcccttggcctctggccttcctgtatataccttattgtctaattttatctctgtcatggtatttttctaaggttcctttctgtgaaatgcacccggctctattcatgaagctccagcggaagcccgtcaggatcatggaaaaacgtcattttccgcttagaataggggtccatacgcacaggctctgtctcaatgcccagcttctgaagctcctttatggtctgctcaatatcctccacccaaaaggccaggtggcgcaggccgcaggcctccggataagaaggacgggccggagctgtgtctatgccgaagatctccagctcacagccattgagctgcagatccagcttataatccctgcgctcctgccggtatacctctcttacaatctgaaatcccaatttatttacataaaagtccttagacctttcataatcagaaactatgatcgccacatgatggatctgctttaggttcataatgcttcctcctagtttttatttagtgttcctccagagctttcaacatctggcgggcattttctgtagcccggaccctgccaaaggctttctcgatcacaccctcctcattgatcaggtatgtggtcctcaccactcccatcgtctttttcccatacatgtttttctctttccacacatcataggcctggatcaccgtcagctccggatctgacagaagtagaaagggcagctggtatttttcctggaacttcttgtgagaagccacagagtccttgctcactccaaggatcaccgcgccctgctccaaaaactggggataatgctccccgaaaccgcaggcctgctttgtacagcccggtgtgttgtcttttgaataaaaataaagaatcaccttttttcctttaaattcttccagggtgtgcacctgcccatcctggtccggcagggcaaagtccggtgccttccttcctgtttccaacataacaatccctcctaggtgttttttgtataagaatcaataacacttctattgtagaaggcttccgcggaaaattcaacaggtttctctggacggcctgaaaaaaatcccttatgataaagatagccattttatgcccaacaggattctttgccctggcaggattccatggacggcaaatgcaaatccggcagacaggaccaaaattttaagtcctgccccaccgttaattttagatgataaggagtatctctatggaacgattgatcgtactgggtacaggaaatgcctcagccattcactgctacaatacctgctttgccatgcagaagggagaagaatattttctcacagatgcaggcggtggaaatggaattctgtatgccttagacaaggccaaaatccctctggaaaaaatccatcacatctttgtcacccatgcccacaatgaccatgtcctgggaatggtatggctgatccgcctcatcggaacaaaaatgaacaagggctcctatgaaggtaagcttcatatttactgccacaaggagctggtggacaccattaagaccatcaccaaactcaccgtaggcaagaaattccaccggcattttgatgaacggatgctctttcacgtagtggagcataaggataaaaaagaaatcctgggagaccgatttaccttctttgacattggctccaccaaggaaaaacagtttggctattccataaaaatggacaatgggatcaagctggccttccccggggacgaaccttaccgggaacctctttatccttttgtaaagggctcccaatggctgctccatgaagccttctgtctctatgaagaacgggacagattcaaaccctatgagaaacaccacagtaccgtcaaggatgcctgtgagcttgcccagaatctggagatccccaatctggtcctatggcacaccgaggaccaggatatcccccatcgaaaggagcgctacctggcagagggaacgccttattacaccggaaatctctatattccggatgatcatgatgtactggatctgaaataatcctgcctgcccataggcccggatgtccccacccataaaacctgatgccggccgcttccttgggatccacggcagaaaaaaaagaacagacagccttcaccgggcctctgttcttttttccttcatgcctctggccagatagaccacgggcgtatccgcaagacttgtaaatataaaaaccacatagctgaagatcatcacttccaccagggtcttactgtcatagatcccccaaaaggctcccagagtaaaaagcactgtatttaataactgggatgccaatgtagaaccgttgttccgcagccacaaaaaccgccttccatccccgaatttccttttggtaaaatcccaccatttatgataaagccatacatcaaacttctgcacgatcccgtagaccacaagaccggtaagcatcaccctgggtgtgttggaaaaaacagccttgatgctgtcaaagatcatatcgttttcacttggcacatacagcagccacagctgggagatcaacagaaaactggctgacgtgaggattcccagattcaccgcccggttggccgctttctttcccgaaacctcacttagaatatctgtgaccaggaaagtggatgcaaaaaggatgttccccaaagtctgttccatgccaaaggccttgatcaaaatcaacacctcgatattggccgcaatggtagccagaacggtccagcagtacatacctgcgtctcctaaaagccggtaccacagaagcactcctccatagataaccaatagattaatgatcaacaaaatttcatttctcattagactcccactccaaaatccgtattatttaaaagaatatccacccggtcattatctaagtagtccggatagatcctctcctggaatatctggatcaccctggggtccggcaggaccggcctggtattttccaccattatattcacacacaccctctcaaaatattccagtccaatttcaatgtctctgcgcatggaggcctccgtctgaccgggcagcccctgcagaaggcacacctggtcaaaatacccggcgatctccttgggattgtccgtgtcaatccccttgaccagataagattcccgaaacagccggtcaaaggtctccacaccaatcttcgtcttcactgcgatgccattgtcatgaaaccgtgccttcagcaggggaatttcctcccggtgcatccaatgggattcaaaattcaattcccggatatttttctccaggcacagctgaagaatcaactccatggtgtgtgcatccaagtccacaaagctccctgaattgatcacctccagcttcccccattccccggtgacctgctccatcacccttctgttaagaacaaaattctcctcctcatctctggaaaaatccacatggtaatcgcagaatctgcaccgcctccaggcacagcccttcccccgaagcagcacgatctcccttggattcttctccgtgatcaccgaatacctgtattcaaaaggcacctcacccatctgcatctgcctccctttcccaatctcttgcctttctatccttcctttacaaggtttattatccaactgattataacccatttattcacaaaataccattcccatataaaagagaaggatcctcacatagccttaaccagatataagcggtctgtgtgtggtattctaaaacaaaaacttcactccacaattgcgaaatatatgtgaaatctctgaaaaacaacaccctgatattgtaaagaattttcctataaggtataattttataaattaaccgcactaataagatcaacaatactgacaaaatacttgatgcttagaataggaggtcctcatggattctcagaaaaagaatattttacccagcaggccttatgtgtcttccaacgcccgctgtgcttttaccatccttcagtacacctccctgggccccgaaggcctgatccggtgtgctaaggccatagaaagccaaaccatttccagggatttcttccaggtgatctacctcacctcttcctccctggactgttctgactttaaggacagtctccctggaaatgcccgttttatccagagtgccaacgctgaccccacccagctgatcaatcaggggattaccaacgcccagggagaatatttatgcttcctggaggaagaagactctctctccccggatactctggaggccttacactccaccatggaggaggccgggatctatccggacgtgctgcgttttcccacagtgcttcaggggaaggagccccctgtccctacggatgaggttccggatctcaccgtgctggatcttcataaaaattatgcctcccagccctgcagtctgaaaggaatactgctgaaagcatccctttttcacagggaactgctggatgaatcccttggctattttgcatttctgccctggctcacctgccatatcaacaccacttgcacagtggcaaggtgcaccaagggcctgcatgtccaccacagtacccaaaatagcctggataaatataagagtctcaccacaacccctgaattcttccaaagaaccatcctggagccttatgccctctatgaaacccgagaaaagcaggtgcccttgtacgtgcaatattccctggccaggaacataggaacctatcttttggataaagaaaatcccctgcacatgaatgccgttctggaccttacggctaaattttcagacactgccatctggaaaatcccctccatgaattcttaccagaagcgctggctgctctctgaaaagtacgcccgacagggacgttctctaccaaaaaaatacttcgatccagcctcacttcctgtgcatattgatgccatcaccagcgatgacaccagcatttatattgagggttttctggtttccttatgttttgaggacctggagaaaacagattttttcatagaagcagacaaaacccccatcacctatacacctgtagaccgcagtgattttaatcaacatttattcagcagatccattagttttgcccggggattctgctttaaaattccggcagatccctgccctgtaactacgatcacttttaaataccggctggccaacggcaggatcgtccagcgcagccagctccattatcgaaaaatgtgctgtctgtcagagcaatggccggaaatctactctgcccagggaaattggctgatctccagaaatgaaagcaagattttcatacaaagaaacaccttttttaatcatctgaagaaggaattcaagctgtaccgaagtcttctgaataccacagacccagacctgcacaaagcggtgcgggaacgtatgacttatcagtggaaaaagctgtggaagcgcagacaaatctggctgatttccgataaaacctatcgtggcgatgacaatggggaagccctttttcagtacttgtgcaaagaaaaaccaaaggatatcgacttctactttgtagtggaggagacttccccggattttgaaagactgtcaaaggaagggcaggtggttccctacctttctcaaaaacataaggaattgtttcttctgtgcgactataacatcggcgcctacctgcagaagggaattttaaaccccatctcttatacagacagagcctttcaggatattatggcccaacagaaacgggtatttatccagcacggagttacacacaatgatgtatccttcagcgcccagaaatatgccagggatttttccctgatcacctgcgcctcctccagagaatatgatgcttttctggaagcccactatcattttacaccccgaaacctggcccttaccggtttttccagatatgaccagctgtacaatgagccccagaaaatcattacctttgcccccacctggagaaaagagctgtttgcgggaatggattatcatgatgtatggacactgctccctggttttgaacaaagtgcatactataagaatatcacaggtcttgtgaatgaccaaaggctgctggacactgcacagcggctgggttataccattttgtttgtcccccatcccgtgcacctgcaccatctggacctgttccatctggaccccaggatttctgttcccaaagaagaaatgtcctaccgggagatctttgccgccagcagcctcctcatcacagactactcctccgtggcctttgattttgcctacttgaataagccggtggtatattttcagtttgacaaagaggacttctttgagggcagccactataagaccgggtatttccagtatgagtcggacggcttcggggaggtcacagaaaacctgccacagaccctggatttgatcatttcatatatggaaaatgactgtaaaatgaaagctctttaccaagaccgggtaaaccatttctttgcctttcacgacaaggaaaactgccgcaggatctacgaggccatccggaattttcaatagaccggaaagcattgtgccttaaggtgcgcctgatgtaagatataataaaaataagcatatttccctgtcatcagccctatgtctgaaaggggaatatgcttgtttttatagaaaaaactcctatgcctccagtatgagctccatccctgtcttctgaggcttcaggccgcatttttcgtaaaactgtctggccccctcattacagctccatacattcagggtcacattgtagcagccctgctcccttgcaaaccccaccgcggcttcatagagacggcggccgatgtgctgcccccggaggttctcatccacacacagatcatcaatatacaaggtcttaatatctgtaagtatattatcatttaaatgctgctgaaatacacagaacgtatatcccaacaccttctcctcctggtcaacggccacaaaaatcggccttgccgggtcatggatcagtgcttttagctgctcatccgtatatttcttggcatctgccttaaacaggtccggtctgcccttatgatgcaccatcaatacctggcacaacagacggttgatcccctccatatccttttcttctgctcttctgatgatcattctatcccactcctgtcccatttttctgtaattcattatacttcttttctcacaaggaaacaagaataaactttgcaagagtaccgtgctattaaactgctgtggaactgtaatcacccgggctgaaaacagtaggcagtctcaaaattttgtcaataagcagccgtagaacctttcatcagaaaaaacttttatattgcaccttttttcaaaatagtgtaatctctagttataattaaccagaattaactatcacaaggcttgttccctgcacgcgttccatagacagtgatctgccccaaatgccctttctcactacgctttttggcacttttgtttagggtaaatgcatacagtaagattaagcggaaaccttaataatccagttttccaatcaaaggtagggtgattctatgctgcagaaatattttgcagggatggacgaaggaacggagcttctcctgtgtctttccattattttattttccggctttttggtaacccggctgacaaatatatttaagctgcccagagttaccgggtacattttagctggtattctaatcggtcccaatatgttgaatttaattcctgttaacctgatcacccagatgggctttgtgagcaacctggccctggcctttatcgccttcggggtaggaaaatttttcaaaaaagacgtgatcgccaaaactgggagcagaattatattgatcacccttctggaagccctagcggcagggtttctcgtagccgtatttaccaggcttttattccatttaagctgggatttctctctgcttttgggtgccatcgccacagctacagctcccgccagcacggttatgaccatcaaccaatacaaagtcaaaggggccttcgtggatactctgcttcagatcgttgccctggacgatgtggtatgcctgctcaccttcagcgttgtggcagtcattgcaggccaggacggaagcgggaccgtatctgtcatggatattgcaatgccgattttttataatctcctggtactgtttctgggtttcctctgcggtctggtattaagccgccttctggtcccccagcgaagcagggataaccgcctgatcctggtggtggccatgcttctgggaatctctgggatctgccagctgtgggatatctcccccctgttgtcctgtatggttttcggagcctcctatatcaacctcaccaaggataaaaaactctacaatcaggtgaaccggtttacaccccccattatgtcaatcttcttcatcgtctcgggtatgaacctggacctgaccaccctgactactgcaggagtcatgggcgtggcctatttctttatccgcatcataggaaaatatctgggctgctatctgggctgcgcctttacaggaatggacaaaagcatccgaaattacgcaggcctggctctggttccccaggcgggcgttgccatcggtctagcttttctgggcagaagacttctccccggccccatgggagaacttcttctcacgattattctgtcctcctctgtcttatatgagatggtcggccccatctgcgcaaaacaggctctcatctggtccggaagcctttctagagaaaagcttaagggaagcgctcccaaatagccggtctttcgctactttggcaggtctcccccaatgcccacacggttccagccccttagcagaaggcccaacagtacggctccatccagtgctaagatgactgttacatgtttcaggatcccggctaaaaataagatcgtaaaaatttctgccgacaatgccacaaagcataagaaattgctgatataatcagctatggtgtcactgcgcatcccttttagatacagccatctccagataaagggccgcagaagaaagcggatcacaatacacaccccagggtaggcgaaaataaaaattttgtccatccaggagctcacggtgtcccctctccactgtacagggattttttccgggagccaggaaaaagacagcagggctgtgagcagacagaggatggtcaggcctgcccacaccgccggtccggcccatgcataaataaaccccacggtgtccagcctgaataccttcttattggcttcccaatagtctggcaggctgtttacataatcctgcacatctaaatcacgaaaattcagctccttttccttgagcatctgctgacacaaaagctttgctttttccaagtctgatatctcattttccagagtttttgtctgcttttttataaccgcatacagggactcctggtccccaataactttcctgatatcctccactgaaatattcaaggtccgcaggtatgctattttctcgatcagctccacgtcttccatggaataatcccgatagccgtttctttcattgcgctgaggagtaagaagcttttccttttcataaaatcgaatgttggatctggataaaccagtcttttcctctacctctttaattgtcataaatatgcaccttctttgctgttttatatcatactgctcctattctgtggctaagtatagggtataaaccaggttcacagtcaagtattttcttgaataaacacacattttaaccaaacgtccctgtccccttcccaaaacatacaaaaatccgtctgacatttccaagaatatacttgaagcaatgtcacacggacttttggtatcatttaagcatctaattcctatgcaatgccgtcagacctcctggctgtcaattacctcctgctccagcttcacatgatgctccagcatatagtctgcacactgtttttctgcggcccccatttttgtatcccacagcctctttaaccggtttctgtcattttccgtaagctttttcccatatttttcatactttttcagtgtctccagatccatctgatacagggcaaagggaatctcggttttctcccgcaaatgataataaatctgaaatcctcctgcatcaatgtcaccaaaatggtaataccccgcctctggaaatgcctggtaaatctttttcagcaaagcccgtcttacgtggttgtgatacccgcccagataaataatcaaactgttcttcctttcaaacctaaaaaaagtggtaagattttctatggtatacacagccgcaataggctctgttgctgtaatctgaatttcatgaaaattccggttattaagggcaaatcccagcccctctggaaacacgtggacatttacactttgctgtcccagatgcagctgcaccttccccttcaaatacacatagctggggttatggtaaatctgatattccgaaagaagctcttcattttccagactctcatattcctgtatctcctcccgcaggatcttgcagagctttccggtcagcttttcaaagcgcttgctgtcatggaaatggcggatggaaaactcccgcacaaagcactcttcctcatttcgctctgtctgcgtgagggcatataccagttcctccagctcccctaaattggcaatgtccatatattcctttacagactttcccgcctgtacccgctgtgccatgcgctgcaaaaatccttctgccgccggggataggtctgtttccaggagctctctcatcttagcaagggccgctgcttccacatctgtcttggggatccggttcatataacggtaaatctccggcagggcattttcacacaaaatgaccttttggataatgtgatctaccctcttatttttccagcaaatagtgagaaatcctctctcctccagctgtctggctataatgtggatgtcttcataagccgtggaactctcatcaaaatattctggtatattctcctttttaaatggataagagatatgcactgctaccttattttcaccccgggacagcttactgccctcatacagatccagcagcttattcagaatccttttctctactggtgtcatagtgatattcctccacaaaacttagcttatcatccgtcaagacaagtaacgtctcctccattttcggcccaatatactgaattttatccggaggtgctgcgataatgatctgaagaggcaggcggtttaggaattccagaacgcctccgattctttcatcatccatgttattaaaggcttcatcaaacatcacaagtccaatggattctcccccaatattattgctgtaaagctgcacaaaggatgctgccaccgtcacataaaacggcgtctgggtctcccctccgctcttctcctcacacaccttagagtacagagaataagtcccatcttcgtggaggatcttaatatcatagtccatataagttctgtaatctgtaaattcatcaagggtcttggcaccattatcctgatccagtgccagcctggagaacagctcgtcaatgacttctttgtgattttcatggaacatgccgctgaaaatagattctccctgcaccacattaaaatcatccatgatcatctcgtaatattttccatatttcttacttggcaggaaaagaaattcatacttttcattgctaaatgcaatcccccgcagtgccttgttcagctccttaaattcaccctgggcctgcttcatattctcctgcagcttggataaaaactgctccctaaactcttcctccgcagacatcctggccctggtcaccttgtcctcataactgagcagttctgaagtcaccagccggtcctgaaccgccgcatactcaggatatgcttcataagtggcgccagccccaaaatcaaaagccgttttgtaatccaccatggcctgtgtcattttttcattggcattttcctcattggtatggtttgccttacgccgcctgtcgaaattaaaccggaactgttcataggtcttatctgccgtctgtttctcatactctctgcgccaaacagtgatcaattctcccgccttggcagaaagttcacccaccagcccctgcttggcagcctggactgctttggcatctgtctgggcctgctgggcgtattgtatattagtttcacaggctccgatctcctgatcctttttggagatctttctctgaatttccttgcattccttttgtaattcctccgcccgtatctgcttttcaataaaagaagaatgcttctttaactgttcaatttcctgtttacattttcctatggcaatggacgttctcttcagttcccccagaatgggaagacggtatttcacatccacatcagcctctgaatccagatattccaaggtgttctgaaccatatttttacggtctgtctgctctttttgctgaagctttaactcctccagctttttcttagcctgctgaagctggatccgcactgcattttttccaatgaagggcacttcatagattccgggcctgatggcactggccacatggttttggtagcgcatgcagtctggggtaatggaaacctcatatttctttaactcctccacccgctggcacatgtgcacctttcccagcaccatattaatatatcgtttcgcataaatatttcccgactccaccattcctgcaagacttcctgcaggcactgtgtcatatgcttccagctttcctgtattgatcagccctactccgctggcctttttctctttattcagcttctcataaatgcccagtgcaatatcgaaatgttccggctccacaaggatataaaacctctgggtatttaaatatccctcaactgcatttctccatgtttcatttgcaatctccaataattcacacagtattttcggcttttccgtgcgtccgatccgcaagaattcctgctcaattttattttgcagaacctctacctcccgtggataggaaaagcgctggcgctccagctttttaagattctgctccacgtctgctcggtctgccgaaagaatattcagcctgctctggatctccagaagcttttcctgcaatcttcggaacatctccttcttataccgtatgacctcatccacaagctcagccgcgaatgcaatatcttcaatatcctttaaaccacggagcagctcctggtacttctccacacatccatccacgtccttgatctgagacagctgatttgctttatgcagagctttctttccactggccagcagatatttccgttcctccgtctgcctgtcccggtcctctttcagtgcagccagcctctttttctgctcctccagggcctgaaattctttattttgacgcagctcaaccagcaatgtggtacagatatcattcttattattgtattccttctgcaggtcagattttaaatccgtcaattctgtataacggtactgctcccctttgatttttttggacagctcctggatctgcccctgcacaatgtccaaatcagactgagccagataatattcgtacatctggtctgcatttcggcagtctgtaactattttataatatttttcaatttcttccagcttttcaattcgacgtttcacaccctccagagtcttctccagctcctgataggtccttacattttcccggagggtatcaatgttcacttccttttcatccagcacataggaatagacgaaatccttaatgtcatcaatgggtttaaaggccaacgcctttgggatcagctggaaaaacttatcttcgatccttccgaaccgctgcttcatcatgcgctttgcctctgcattggtctttgcaaaggtcttgatctttttctggttaaatgtgcgaaattctgctatcgtcctgggctgcttccccactttaaacatctcgtcagaaagcatactgttatcgattaaatatcttgccaccgtctcctgtccttctgtggctgaatctatgacagcgcctacaataaagtaccgcttcttactctcttcataaaattccaatgcaatgtgggcactgatctccccggtccgttcataaggctgatgctcccggcctgttttacatcggatatatcctgtcagcttcctcttcccattgtcatgagccgccttattaaaatgattggcggagcaggtaaccacaaattgaatggcgtccagaagtgtagattttcctgccccattttcccctgagatcagcgtggaatcaccaaaatcaatggtaatgtcggaaaaccgatgccagttaatcagcttcagtctggtcagtttcttcatcactctggttcccctttcgataggtttctattttctcatatacacttttaatatcttccacacgcactgccatcaagatggaattgtaaattaaaattcgggattcctcattcttcagatcactgtccagaagttctatcagctggtaccgctttaacatacgaagggtatttcccatagttgttttatcgatcatcttctcccggatcttcaggcttaaaaatttatcctgaatatcccccagattcacaataacctcatcagataaagacaattctctctttttttcatcaaataaaatacgaagcagaagtaaaataatggattcatacaattttaaattctggcggttggtgttcagcccattggtaagctgaataaccccatattcctcgttgatttccagccgatatcccagagttcccaataaatcttcgaatttttccttatacttcagtacaaaataataatctgattttgtggtctcattcttcttacatagaaaacagacattaataagccggttacagattctgcggaattcctcctgctctctttggagcattccctccagtaaattcatctcttacttctccttcttttcaactgtaaaatccggaaaactgtattcaccatatttgtgaagaggatactcctcctttttaatacgatatcccatatttttccgggagccatacagacggatataaataatttttataaaatcctccactgtctcgcaggaaaactccgatgccctcatgatccttcgctgccccatctgcaccttcacataactgtcaatcctttcagggcttagaatgcgctgcatcttctctgtcatccgcttcaatttttcctgccggctgagaagatccggctccgtcacagtaagctcctgaggatggaattctttccttccctctatgggactataaaaggatttttcatccagaaagctgctgccaaacaaccgcaccagctgatctacatattctatttcatagattccatttaaatccatacccttttcattgatctgctcattcataaatatcaggatttccttcagctgccctctcacatcctcactgcctgccagcaaaaacttggccctgttaatggatgctctctgatattgagtatttttctgatcaatctctgccaatatatcatccatactgcggaacgcctcaataatttcatgaagatactggtaggtcagctcccttgcctgctccacaggaatttcccgcagattggcaaattcctccgctgttttggaaatataggcctggcttctgctgtggctctccagcctctctataatttccggccggaactttgacacattgtcagaagtcagcagtctatgataggctttatccacaatattcgtaatataatcattaaacagtgcattcatgatttccgccactgttttatgccgggtaagttcatcgatataatgtttaatgttagaattgagatttttcagcccggtgatcagcagatccgtattttcaaaaatctgctgtaaaaccacagccggatgatcggtatctgatttaaccagactataaatcacatagatatagccctgatactctactttcttcccatttgagatttccagtaaggtcttaatgatattcaccgcataatcgtgaaaattcacacgctgcacataacttttatccgtctccacctcaagccacccgaaattctccagcagccgcagcatctcattggcttttttcctggggtccccattggcaagctcctcttcctcgaactccgccgcctggttctgctcaaaataaaactgcagttcatttaccaaaatctccctttccatcccaaaagaaagctgcgcatccatcaccgtaaataatttatgaatacagtcccagtaaacaagccgattgggtgatgacaggggcgagaaaaacttgggtgggagaatatcaaacagcggactggtaagctcctgggtggggacatactcctgaggcttctctggcggctgggaaggttgtatgggatttgtaggttttatagattttgtggctttcgtcgcttttatggatttttttgctcgtggcattgtccggatcgtctcctgaatttctttaaaaggttttcggttttctataatatgagttacattttaatacataaatgaaattaatacaatgatttaattttacatcaaaaaggatgaagattccttatattttgggtattttttgaaggttgttcacaaaagggctgctacaatgacggttctgtggataaatctgcggaaactcaaggtatttacagattgattttctatgcccgacatgctataataaacgcataaaaagagcaaccgcccacaaggtggaagccctcaagttaaggttttacgtccttacagacgcgcctatcctgttggccgacagggtaggcatttttttatttccggttatgcctatctatgtaggtcagtaacgcgatgaggaatgtgccgcccacaaagagcaagctcaacacttcaaatattcccatccgcatcacctcccctcttttggagtggagggtcctaccctgtacgcggtgctcatggtgaaattctaccacaggattcgaaaataatcaatctcacctattttccctcatttttggaaaaataatgtcacagcaatgtcacgggccataaaaaaagtccgggaacccgcataaacactaggttcctggactttgcctaatcattcaaattctatagtagccggtggtttccctgtacagtcatacaacacccggttcacatgcttcacttcattcacgatcctgctggtagccttcccaataatctcccatggcaggtccgcgctctccgcagtcataaaatccgtagtggtaaccgcccgcaaggcaatggcatagtcataggttctctcatcccccataactcccactgacttcatattggtcagtgcagcaaaatactgattcaccttcttatcccagccagccttggcgatttcctctctccaaatggcatccgcatcctgaaccattttcaccttctcggcagtaatatcaccgatgatccggattcccagccccggtccggggaatggctggcgaaataccaaatattccggaattccaagctccaggcccgccttgcgcacctcatccttaaacaaatcccttaacggctcaataatctccttaaaatccacacaatccggcagacctcccacattgtgatgagattttataaccgtagactctccgcccacgccgctttccacaacatcgggataaatggtaccctgcaccagaaaatccacagccccgatcttcctggcctcttcttcaaacacgcggataaactcctcgccaataatctttctcttatcctccggctcctgcacgcccttcaatttttcataaaaacgctcttgggcattcacccggataaagttcagattatacgctccgtcaggcccaaagacagcttccacctcatccccctcattcttcctgagaaggccgtgatccacaaatacacaggtaagctggctgcccaccgctttggacagcagcactgctgccacagaggaatccacaccgccggaaagagcacaaagcaccttgcctgttcctactttttcacgaatggacttaatggactcttccacaaaggaatccatcttccagtccccagcgcagccgcatacctgatatacaaaattggacagcattttggtgccctcctgggtatgaagcacttcaggatggaactgaaccgcataaagctttttctccaaattttccacagccgctgccggacagtcctgggtatgggcaatgaccttaaatcccggtgccaccttagaaatataatcattatggctcatccagcagattgtctgaggagacaccttagaaaacagcctggaggacgtgtccacagtcacctcaatctttccatattcccgaactggcgccttttccaccttgcctcccagaacatgcatcataagctgagagccatagcagattccaaggatcgggataccaagctcaaaaatctctttattataagtgggggaatcttcttcataacagctgtttggaccaccggtaaagataatgcccttgggctggatttccttgattttttccagatctgtcttgtaggaataaatctcacagtatacattacattctcttacccgccgggcgatcaactgattatactgtccgccgaaatctagtactaccactgtttctctcttcatgttgttcctcctcaagtactttgtcatgttcatatttttgactattgttaaccattatataagaaagctgtctgcattacaatgaaaaaaatcaaagattcaggcgcacccatttattccctctgtaacgtaccacaaaaaatgcggcccgtaccacccagtcaatggtcatggcaacccagactccgaacacacccattcctaaaaactttgccagaataaagctgaaaccaatacggaaaatccacatagaaccaatggagacccacatacagaatcccacatcatttgctgcccgcagggcgtttggaagcgtaaaggacaaagcccagatgctcacagcacacactgcatggtacagaataatttcagtggccatttccccagtctccggagacagattgtaaattcggatgatcagggacaaagcagacacgatgataacattcatcaacacaagtcccgcataggaaaatttcaaaagcttttttgtgtaataccgcacctgctcaaaatctccggctcccacacactgggctgtgaccgcggacaaggcatatcccatggacatgccgcccagtatagcaaagttgcacacactgttgcacactgcattcgctgcaatggacgttgtgccaaagctggaaaccagactcagtacaagaatctttcccagctggaacatactgttttccagactgtatggaataccaagatgaagaattttcttcaaaaccggccatttcagccggattcccaaaagggaccgtacatgaagcgcctgttttttatcctgaatctttttcagcatccatacccctgcaaaaatcctggacagggttgtgggtatcgctgcgccttcaatgccccaccccagtccatacagcagtaaggcattaccggccagattcatcccattcatgatcagggacattttcataggagttttggaatctcccatggcacggtaaatggccgcaccggcattatacattgccaaaaaaggaacggaagcatttacgatcaaaagatatgtattacaattactcattacatccggttcaatatgcccgaaaacaatgtgcagaataaaccattttcccagatagacaactgccatcactatggttgaaaagatcacggaaaacagaatcagctgctctgtcgcctcacagccttcctcctgcattttccgcccaagggcttggccagccacaatggcgccgcctgtggccaatgcggtaaaaatatttatcagcagcaccatgatcgtatcgatcaaggaaactgccgacactgctgattcccctacggaggccaccataatggagtccgcaaggcccacaaaaatagccagaaactgttcaattataagtggaataatgagttttctaagatcccggctgctaaacagataccctttagatacgacttttgaagacttcaaaaaatacaccagactttctatttcaaatattgtttcatttgctcatggttttcattataaagctgaaaatcctcataagcaaggaaaaatgaaggaccctgttgtagaaaacagggcctctttttgtgatattttattgcatattgttagttgtctggattttcaggtctatccctggatcatatctggccaggacaagatctccttttcaatgatttcttcgtaatcaccttccaaatacacatcccggccggcgttctgaatatttgtctctacgctccagccattgtcctcaacctcccacacatgataccggatacccttaaacaaaaagtcaatgcttccggctttgtcctcctcagaataagaatactcgattcttttcttcttcaatgcctcctgtactcgttctaaacgcattgctgcctcctgtaattccatttcttttttatctgaacgcagctttcctgccggcccccactgcggggcctacttctccagatattttttcctggtggcaagtccaccgcgtatatgccgctcctgcttgttcacatctagaatctgacggacgtcccctgcaagagctgggtttaaacgggataatctttctgttatatccttatgtaccgtgcttttgcttataccaaactttttggctgtctggcgaaccgttgctttggtgtcaatgatataattggcaatctccactgcccgctcttcgatataatctttcaaggataagcctccgaagacgctgtttttacatcctatgaaatgctcaaacgaaatatacggcaattgccataaaacccttacacttcctaaatcctttgcctccccttacacctggataacaaaatcacactttctttccttcgcctgaggatactcacagcttcgatatcctaatatacaatgcccgatcccctcataagagtccggaaccccccacttctccttcagctttttcccttcctcactggaaaacacttccctggcccggtggatccagcaggaatccactcccaaagaataggcggcattcatcagattccccataacaaggcttccattttccacaaaagtcccctgcctgctgtctgcaaacacaataacaagtgtaggcgccccataaaacggatcttcactgctgcccagcactgcggcattcatcatggaaagctccttgatcaactcttgatcctgagtcaccaccatcatggttccctgcatccccataccactgggtgcatactttcctgcttccaaaatttcatttaatttctcctccggcaccagcttctctgaataggcccggatacttcttctctcttttaaagcctttaacacttcattcatagggcaactcctttctctatatccatcccaaaccaccatgctccttcatgcaaggaaaccgcttccccaactgcttatactgtcattgtagcaacaattacaatgaaatacaagtaatattctgtcctctttctgcctctccttgacgccgtcttgtccccttgttatactaaaaccagaacaccaaaaccgaacctaatactttcccggttttcagaaaggattatatgatgaaacagattcttcttattgcaacaggaggaaccatagcctccaaatataccgatacaggcctcaccccacagcttgacgccgcacagcttctctcctacattccggaagcggcagaaatctgtcagattcacaccatagaacccttcagcttagacagtaccaacgtaaatgtaacacaatggctggagctggctaaattggtggaaaaaaactatgaattttacgacggttttgtcatctgccacggcacagacactatggcatacactgccgccgcactttcctatttaatacaaaacaaccggaaaccaattgtcatcaccggttcccaaaagcccatcaatctggcagtaactgacgcccgctccaatcttctggacagcctgcgcttcgcctcccacgaccgtgcccatggagtatccattgtatttggaggccgtgtgatcgcaggaacccgggctaagaaagtgcgctccaaaagctacaatgccttctccagcattaactacccggacatcgccgccatacacgaaaacaagatcattttctatattgatgacaaagaacaatccaccaagctgctcaccttctccaaaaagatgaatgacaggatcttccttctaaagctcatccccggcatacagggcaatgtgctggatctgctgttttcctcctatgacgggatcattatcgaatccttcggtgtaggcggcctgcccaactatggcgacgacagcttcctatctgccatagaaaaatggaccgccgcaggaaagctggtggtcatggccacccaggtgactcatgagggcagcgacatgtccgtgtatcaggtgggaaagatcgcaaaagaccgctttcagctcctggaatcctacgacatgaccctggaggcaactgtcacgaaaatgatgtgggcgctgggtgtgacaaaagatttcgaagaattcaaaaaactgttttataccactgtaaatcatgaccttttatttatttgatcaaacgccagcctcccttcacaagtatcaggcggatctcctccgtctgatacctactcacccctgatgcctttccacgcagtccaatcctgccgctctcccttccatatttctgtactgcagactgcatttgtgaaacccattgttggcccaagccttccgcatacccttcaatatttcttgtttccctgttttatatgctgtataataacccaaggacccaaattttacaaaacataaaaacccgaggtggactatgaataaaaaagaaatttcagagatcaaaaagcaattcacccctgctaactgcgccataacccgaatttgcggctgctacgtggatgctgaaaaaaataaaaaaacagagctgaagaaaacctttctcagcttatctgaggaagaaatgttcaaatatttcgagattttcaagaaaaccctgtccgggaatctgggaaaaaatctcatgaacatggccttccccctggagcaggaggcagaaggcggcacccagcattttcttttaaatcttagaaacagcaagctgaaggacgaccagctcacagaagccttctttgataaaatcattgaaaactatacctatccagaaaactattatatcatccttatccacgccgcctacgatgtgccgggaaaaaccaaggacggtctggacatggaggacgcctccgatgaggtgtacgagttcgtgctgtgcagcatctgtccggtaaagctgtccaaagcaggactctgctacaatgcacagaataataccattgaagaccgtatccgggactggatcgtggagatgcctgatctgggctttctgttcccagtattcaatgaccgaagtacagacatccacagtctcctttattactccaaaaatgccaatgagctcccttatgatttcattgaccagctctttggctgcatggctcccctcactgccacaggccaaaaggaaacctttaataccctcattgaggataccctgggaagcagctgcagtctggagacagttaagaccatccatgagaaactaaacgagatcattgatgaacgcaaggatgacccagaacccctggctttggaccagaacgaagtaaaacgtctgctggaatccactggtgttaaagaagacgccctggaggattttgactccaaattccaggttgcctccggcggagagcccgctcctttaatggtttccaaccttgtaaacccccggcgttttgagattaaaactccggatgtaatgatccatgttaatccggaaaaggtggacctggtggagaccaggaccattgaaggccgcccctgtctggtgattcccatggatgaggatgtggaggtcaacggcattcatgtaaaatcctcaaacggctacataaaccctgccaccggagagatcctgccagagaacagccaggattggcaggattcctgagctgaccttcaacaccttatagaacactaaatagcaaaaaaccctttccagcgcagacggaccgctattggaaagggttttttacactataaaattaaatataaaatacttccggctccttataggaggagcattttgcctgaaatgccaatgctgccggtttataagctacaccgtggtagtccctggcatttctgggacaggccttgatacaggcaccgcaggaaatacatttggacgtgtctgtctcccggcagttatccacagagatcgcctgaacaggacagatctttgcacaagttccacaggctacgcaggttttatccccatccggatggaagggcacaccagagaatttccgctccgttttataacctggattacccttcagctgtatttccttcccctggtataacgcacgttcttccagtatatccctgcatcttcctgcaaagatccgcattgccgtataatccttgtcatttggccgtcctgctcccaccttggggaaaatagaatgctctgccacaaaggcccctgccgcaactactaaaaacccctggccttgcagaatattcttcatctggatcaaagcatcatcataatccctgtttccaaagacagcggcgatcactgccaggctccccctgccctggattttttccagcatgggcacacaaatattggggatcaggcccccgtacacaggcattgacaccaacagtacatcctcctgtcccagcaccagcttatcctccatgttcgtgttcagcaaaggatattcctgggtatccataccaatttcccgggcaagcgtgcgggcaatttcctgtgtggttcccttaccgctgaaatatacattatataatctactcataaccatcgtacctccttatgtaaggcttcactaaccttttaaaagcttatgatttctaattataccatattccgccatagaaacctattcctcttgaacagaaataataatttattgtatgtgtctttattgctttattacttaaacacatactatattttcttacaagaatcatttgcataaaaaatttcttgtagtatactttatatatgaattttgtgccgggggacgtggggttatgaaattactaagaaaactctgtgatattattacaaaagatgtgaaatatacaaatgagccaaatcgttttttcattatgctgcgttgcatttatctacttgaaatgatttatctgttatttttccttacggccaatctgattcacggattctatattttggccgggatcgcagccttatatatacccgtatctctggctgcattttctgccacttaccgactaaggaccggaaaaaatttatttatctttaccttcctcaccattttgtgggtattggtctgcacagcctttcttggctgggagtgtggcatccagaactttcttaccccgctgctgcttatgtttatgctgtgctcctatgcctccatacctctgaaaggaattttcactttctttatactggccttgaggatagggctgttcctctttcaccaacagggatcttatttataccaggcctcccctcaggctgagcttcaccttcagattgtgaacaccattgatgtattagctgtagtcgtgattgtgtgtgcctttctcagctacgatatcaaatcagcagagcgcaagttgattttatataacgaacaattaaagaaacaggcctccacagatccccttactaatttgtggaaccggcggtatatgttgaaccttatagaggaccacatgaatgccattgtttcacagccttttaccatagctcttggggacattgattttttcaaaaaggtcaatgatatcaagggacacaactgcggggatgctgtacttgtacagctggcagcctttctcttggagtccatgagaggtgcaggatatgtatgccgctggggcggggaggaatttttcttcttttttccggacaagaacggggaccaggcggcagaatttatgtgtaacctcaatgtccagatcagccgtctggacctggtgtataaggaagagcactttcatgtgaccatgacctttggcgtggaagaatatgatttcagcagctccatctccgaactgacgaaaaaggtagatgacaagctctatgagggaaaacaccggggccgaaaccaggttgtgtactaaagctggacttttctattaaatgcgcaaaaaaggtgcatcccctggggagatgcaccttttacatttattaagctaatttcataggattcagctttacgccaggtcccattgtaggagcgatggtaacgctctttaaatactgaccctttaatgcgcttggttttgccttgagaatagcttcgatcagcgtctggaagttgtcggttaactgctcttcagtaaaggaagctttaccgatgggcacgtggataatgttggttttatcgagacgatactcaatcttacctgctttaatatcacgtacggctttggttacgtccatggttacagtaccggctttggggtttggcattaaaccttttggtccaagtacacggcccagacgtccaacaacacccatcatatccggggttgctacaacaacatcaaagtctaaccatccttcgttctgaatcttgggaattaattcctctgctccaacgaattctgctccggctgctcttgcttcatcagcttttgcatcctttgcaaatactaaaacacgtacttttttaccagttccgtgaggcagaacaacggctccacgaatctgctggtcagcgtgacgtccgtcacagcctgtacgaatatggacctcaacggtctcatcgaatttagcaacagctgttttcttcactaagctgattgcttcgtttacgtcatataatgtagaacggtcaactgctttcgcagcctcaacgtatttctttcctcgtttcatttctataacctcctgtggtagttgcgggaatgtccctcccacttgttcttattagtcttctacagtgatacccatacttctggcagtaccagcgatcatgctcatagctgcttcaacggatgctgcatttaagtctttcatcttcatttcagcaatttcctgaatctgagccttagttacttttgcaaccttggttttgttcggaacgccggaaccagatttaatcttagcagcttttttcagaagaactgctgccggcggagttttggttatgaagctgaaacttctgtctgcgtaaacagtgatcacaaccgggatgatcaggtcaccctggtcagctgttcttgcattaaattcctttgtaaactgtacaatgtttacaccatgctgtccaagtgcaggaccaactggcggtgctggagttgcttttccagccggaatctgtaatttaatatatcctgttactttttttgccatttttcggcacctcctatgtggtattggcgggggtaagatccctcccactttgtgttacctgttacatatccattttcttaatttctgcgaaactgatctcaaccggtgtctcccggccgaacagctcaacattgatcgtaacgacctttttctgcatgttgatgctctgaactactccggtggtgtctttccaggcccctccggtcacgactacccagtcgccttccgcgaagtccacatgaagactctcatccttaatgccaaggggaagcatctcctcctcagtgagaggtacaggctttgaccccggacccacgaatcctgtgacaccacgggtgtttctcaccacataccaggtgtcgtcattcatcaccatgttcagcagaacatagcccgggaacatcttcttctggacagatttctgaacgccgtttttcagttccataacatcctgcatgggaacccggacctccaggatctgctcttccaagtgtcgattctcaattgtcttttcaatgttggcctttaccttgttctcatacccggaataggtatgaacaacataccattttgcttctgacatacaatcaccttttccttattttaagataagattaagtcctaccaggatcccactgtcgaagacactggttaatactgccagaatagctgtaatgaccacaacggcaactgtctgttttaccagagtgttcttatctgtccaaataatttttttaaattctgattgaagtccctgaaaccaactttttttctggactttgccagccttttcattttctcccatagcctacctcacaattcttgtgattacttcgtttccttgtgcagagtatgtttatggcagaacttacaatatttcttggtttccattctttccggatggtttttcttttccttggtcatattgtagttacgctgcttgcactccgtacatgctaatgtaattttaacgcgcacaacttccacctccagtgattttcatttgcacggtcttcctcctattttcataaaaaagtgcttgtacacaccttttcgggcataaaaaaaagacctaacttccatgtcgcttgttcagtctatcacatgtcaagcctccagtcaagtctttttcccaaaaactccgctaattccccagcctttcccggcctctgaacagctttttaatcttcctcagggaacagggagtaaaattccccgccgcaagctgccaataacggaaaactctcacatccgcctcccactcctgcctggcactatgacagcacaagggcgccagaaagtcctcttccttttcccacacctggacaaaagactcccggcacaggggcagcggccccaaacggtcacgaaagcctgggaaccagtattgattgatcaaggtgaggctgcgcagaacattccctgctccattctttacagaaaaccacttcttccctttttccttcaagccagcccgcagacggtaactgccgtttatgacctccatgcacatcagacaggtcttatcatccgttccctccagaaaagcaaccggctttaaactaaagaaatccaccggcctgccctctctgaaaaaatccgcctgtttccagggccttctgggaagatagggacctgggaaaaaaataaatttctctgcaagggacggaatcctataaagattcagcatcaaagtacaggagcttgtgccctctctaaattgtgtgggaagatactccgacggctccacccagcgcaccttgccatggtgcgaaaatccctgagggcgcttccagcccgtcacatagatcatacctgcccatggaacaagtctgtccacaatctctgcccatcgttccaattttttccccggcatagaatcaggcaccagcaaaacaatatccgtctcttttgattcttttctgctcatcctgcatccctcctactgctgctcatgaatttcataggaagacctttttggaaggatcctgtcaaagcattctctcacggtccgggccttatcctcaaaatcctcaatctcttcccagtcattaatacagatcatctgatatttctgatcacaaatggcatcgcagatttcctggaagctttcttgagtggcaaaaaaactttttccataagaaccgcttctgggttcaaatcttccggacgccatctgccagtatttgaaaataaactgattcacattccccctcatacggaagcggtccatacaggtcttatccaaaaccggcccctcctggtcccacacctcttccataacacttttcagaaagttactgggcagatggggataataaaagttcgtataatacggccataaaagcagcggcagcgttttcatcacctgtttcatgccgtttgcaggagaaagccattttctccaagttttcctgaactgccgggactttggaaaatgcctgttgatgatctccatgttggacaataaataggagcccatggtatgatgagccatattggcaatactctctccaaacacatccctgggcagaccgtttcggaaaaaatcctccggcttcatgggagcggttaaaaacatatcatcattaaaatacacaaactgctcagccagccctgatatccggtgaaggttcagttcaatggtatgggaactgaaggtgggcagatatttttccggaatataatcccggtggttcacaatatgcagtttgggatgatctacattcatccactttggaagatgcccccaggtaacaaaatgcaccttacgcacaaaaggtgcgaactgctccacccctctgaaaaaatactgaagatttccccagtctctgtagcgaatttcatggtccccaaaacctgcctgggagccatcatattttgacttctcttttctccaggcagggtcatttccgtccacccaaataatcacaaaatcaatttccggctgctgttcctttttcatggctcatccattccttctatataatacccttgtatttatactgatttttgtctggttccgattatagcctattcccatttcttttacaatagctttgccagatttccccttttcctattcaccggcaattgctcttctgcatttcctatggtataattattagatatgccacaatcatttggcccggccggtcccttgagatcatccaggcgagccttgataaaaggagatttgtctatgaaacgagtgattacttatggaacctttgacctgctgcactatggtcatattaatcttctccagagggcaaaaaaatacggggattatttaatcgttgccctttccaccgatgaatttaattggaatgagaaacggaaaaaatgctatttttcctacgaagagcgcaggcatcttctagaagctatccgctatgtagatctggtcatccctgaggaaaattgggaacaaaaggtgaccgacgtacaggaatatcatgtggacacctttgtcatgggagatgactggaagggtaaatttgactttttaaaggaatactgtgacgtggtctatcttcccagaaccccggagatttccacaacccagattaagcaggacctgcaaaaatagtctatttatcccttgtttcctgctcaagtttcgtgtatcatgttacaaggaatgatgccaattattttaaaatcgataggagagagcttagcttatgtattataaaaggttccgaacggacatgcagaaatattggaagtataccatatattctgcaaaagcgcagctaaaatccgaaatcgccaattcctatctgaactggctgtggtggattctggatcctttgtgcttcatgctgatttatacctttatgttcggtgtggtatttcatgcatcggaaaaatatttccctgtgttcatcttcactggtatcaccatgtgggactttttcaataaaaacgtgattcaaagtgtaaaaattgtaaaggccaacaaatccattgtgtcaaaggtctatctccccaaatacatgcttttgatcaccaaaatgatggtgaacggctttaagatgctgatctccataggtttgatcgccgtgatggcagtgatctggaaagtgcccatgacagtgaatgcattgtattccatccccatactcatgactctcaccctgataacctttggggttggctgttatcttctgcactatggggttttcgtggaggacctgtccaatgttatgaccattgtactgcgtctggtattttacctgactggtatcttctacgacccgctgaaacgaattcccgctccctacggagcgatcgtatgcaaggcaaacccggtggcatttctattgtcctccctgcgtaactgcctgctctatggaaaggtcccgcaccgtaagctcctgcttctctggtttgtgatcggcgtgatcatctccataatgggaatccgcaaaatctataaaaatgaaaacagctatgtaaaggtgatttaatatggaagaaaaacatgccatagatgtgaccgacctggtcatcagttataaaaaccttaagaaaacctcaatcaaaaaaaatctcctgtccttccgccacagcaaagccgaaaactttgtggcagttaaagggatctccttctatgtaagagagggagaaattttggggatcattggcaaaaacggcagcggcaaatccacgaccctgaatgcccttgcaggtatcttttccccggactccggaaccattgacctgaaaggccacagcatttcccttctatccatcggcgtaggcttccagcgggaaatgaccggcagggaaaatatcgtgctttccggcatgctccttggcttctctgaacaggaggtccgggccaaggaagaagagatcatcgaatttgcagagctgggcaattttattgacatgccggttcgtacttattccagcggtatgttctccaagctggccttctccatcacagccattctggagacggacattatgctcatcgatgaagtgctcagcgttggggatcagaaatttaagaagaaaagctacaacaaaatgaaaagcctgatctccaataaggaccgcacggtagtcatcgtatcccacaacatcagcacccttgaagagctctgcgatactgtcatgtggatgcacgacggcgagatccgcaaaatcggtgaacctaaggaagttctggacgaatatgtagaatttatggaaaaataaaagaaaagcccctgcctcaccgtgtccattcacagacacccctcgtgaaacaagggcttctttttttatgaatctgcattgccccgcttcctgtatccgaaacctattactcgctgggaattgaccccgccgccatactccgcctctcataccaggcctcccttatcaaaaaaaggcccccgccagatacacgctggcagccaccccggccagtgtggcaataagagctccggctagtgtatatcttgtctttttcaccttcacgtacccaaaataaactgtcatacagtaaaaaacactttccgttgaactcaatattagggaagccgtcaggcctagggatgaatccgttccataacgtttgaaaatgtccagcagcagccccgttgccgcgctggaagaaaagaggcggactactgtaagaggcataagctgcggcggaaaacccagtccttccataagcctgcccagagcactacatagaaagtccagaaatccagacgcccgcagaatcccaaccccggtgagcagaccgatcaaggtaggagcgatctgggccactgtcttcaggccatcccgggctccgtccaagaagtccccgtacacatcccgcttagccagcagtccatacccaattacatagaacattagaaggggaatcataagattagacaagtacgtgaaaaatctcatagtctctcccacaaccttacttaccataccttatgaaaccctgctctgattttatacctatttcatattatccagcagactgctcacctgaagggcacaatcacccatggggatccacgcctttgacagacgcaccagacaggattcatccggtgtctgccctggttcaagaagaaaatctctggccagttcatacaccgcccgttcatttcctgaaacccgatgcaggctttcctcccaggttcccagaaccatctccgggtccacctctgtcattttcgacattttctccagaatctcctccatttttatggtatccttctggttccaggctgccagaaacagacacttgcacatgcccttgctgaaaaacggttcttttacagcaaattcgtacatttcaataaaacgcagcttatgcattgcggaaataaagcacctgtgctttgccagttcctcaacgcaataatccctccaatccataattattccctccacttgtacattattttttgtctattataacaaattattgtacatctgaaaagaaagtttcatagaaaactgtcgcattttgtaatctgtattttgcgcaaatattcctctgaaagaactctattccttcttccacccagccgccttacagaataatattcctgcaagagtgctcacggccgtagcggcaatggccggccccacaatggccgccggggccggacttccgtactgactacggtaggcgatcatatttactggcagtatttgaagagaggacacattgatgatcaaaaaggtgcacatggccctgctggctctttccctgtggccattttgcttatccagctcctccatggcctttagtcccgccggagttgccgcccacccaagtcccagaaaattggataaaatatttaccgccagatagtttcctgcctgggaatcttctggaatctctggaaatagaaatttcaaaagaggccgtatttttcttgtgagagcctgaaccagccctgaattctctgcaattttcataagtcccacccaaagcgcagtgatgcctgccatagtaatgcacagcatcaccgcctccttggaggaatccacagctgcctcagtaactgcctgcagatttcctgtaatggtgccatagaccacacctattaaaatcatgcctccccacaaataattcatttccgcctccgcccacttattctacagctaatgtatgagcggacttctgtcctttatacccgttcaatatactgggaaaacatgtatcccctgtatttacccgcaattttcacatgataccacagctgcccctgtgtatctctacgctctccgatcacctccaccagatttcccttgtttaaataaggatactcttccacaggcggatactgggtgcccgggccgctgcgcacatacacgccttccccggtgcatcttcccacccagtctctataagctttttttctgggtattttcagcacctgccctacatagatcaggttcacgtctgtgatgtggtttaaccttgccagctcatttactgtggtatggtacctttgtgcaatccccgacagcgtatcgcccggctgcaccgtatagtcaaaatattcctcatggccgtggctgccgtcatgatcgtggtcatggtcatgatcatcgttgtggtcatgatcatcgttgtgatcaaaatggtctttataaaaaacgtcaagatctacataaccctcaatgccagccacctgaccctttgagctatactgccagccaatcccttcttttggccggagaccttccacaatctgtccctggtcatcatagggataggacgccagccagtactcataaggcagactctgaacatccagcacattgttataccaataaacattactatatattccaaaaggatatccgccccgcacaatcacctcccggaaggccttgatcacggccgtgatctcatctctgggaagtgcttccagctgactccactcaacatcataaaaaaccgggaagtccaggggcctttttcctaacacctccagcaccttttcagcttcctccctggcctcagaaggatttaaagcataacagtatttataaacccctcgtttcatttttacctgggtaaatccctgataatttctctcaaaggaactgtcaatgatatttccccgctctgtgatccgcataatggcgaaaacctttccatcatctgcaatcttttgataattatttatttgattataagcacttacatcaattccaaatatttccataaacaaatgaactcctgctttttttatatactatgcagagcggggaaatttgtcataatccgccgggtacaagtacaataaacagtacttatctttcattgaaaaaaaatagtctagaccttccacacaatctcttttcccagctctgaaacccgcactgcagtgatcaatttatcaactgtaaaccgcttctcttcaaatcctgccatgtcccaattaccaatataaaatgcaatctgctccagctgctccggtgtagccacatttcccgccacctgcaccagttcgtttgccttttcctgtctaaccttctcaatttcttctaccttctgattaatatacaatgtcagagatggtcctgcacccataagagaatccaccaggcgattaatctcctcctccatctcctccaactctctgctgatctcctttacccttggatgctggttggcctttgaatatcccaccggtgtctgggcatccctgagcctctgcagcatttcccgatacacatattcctcaatctccgctgtataaatcttcccacagccagggcaattgcggttgtttagccttttcgtgcaacgaaggtactgcctgccggaccggctctttacactcataagggcgtagccgcagattccacatttgatttttcctgccagccaggtattgctggctttccgattggcatgtatggtcatattattcaaaagcttaattctgcaccgcagccaggtctccgagggaataaacccttcatgaggcgccagcaccagcatctgcccctttaaattctgcagcttatcctcttttacatttctcccctggtacagataacaccccctagtcccgtcaaactcctccggtccggtggcaataactgtaccctggcttttaaaaaagcgatacacgtccatatccgcctgaacatatactggatttctcagaagctgggccaacatgggacgcagcagctcctttccgttaaacacagggccctccttggcaaaataccgggtaatatctccataggaagtctggggctgggcgtacatctcgaaaatcttctccaccctggccgcctccacaggttcccgcaccagcttttttgtatggattccctggatcatggttttttccatggtaaatccatagggcgcctttcctcccatacggaatcccttctggcttctggaataataagcatcgctcacccgcttctgaatggtctccctctccaactgggcaaacacaatacagatattcagcatagccctgcccataggcgtagatgtgtcaaacttctcggtggatgatacaaattccacatgatactgctgaaaaagctccatcatgttggaaaaatcaagaatggacctgctgatgcggtccaacttatatacgatcacctttgcgatctcccctttctcaatatcccgcaaaagcttttgaagctggggccgcaccgtattctttccgctgtatcccctgtcggtatactctttaaaagtaccgccctttaattcgtacttacaaaattcaatctgactctcaatggaaatgctgtcaaccctgtcaacggactgtctcgcataaatagcattgattctgttcatagaatacctcctctgtctaaactctcattcatttcgttgcatgggtaattaaaaaaatttctcacagaattaaagaaatgtaatcttacatagctgacttcagatttccataggattcttttcaaagacaaaatgctgcatataaagggatcaaccgatacctttcagtctgagcaaaattctgaaaggtcattttgcatgccagattcggccggtgagtacttaaatattcactgaggcttctggtctttttgctctccgaagcctttatctccaccgccttccacttcccttctttatttaataaaaaattaagcctcgcctgatttccgctttcccagtaatatagctcatatccgttttgataaaacgcctgagccaggtaattctccagcacggcttcaggccccttctccgcagctaaaagataatgagccgggattccggactgaacagtaagcagtccaatatccggcagatatgccttaaaattggaaatctcttgatccgcccggggaaccgcctcctcacttgtcagtttgggacacatcaaaaggttgtgagaagcagccagccattttacagaaggataatacaattttgcagttcctccacgacgtacactccggtacataaacttcttattctccttttccagctgcctggatatggaattatagcagctgcagatgtgatatccttccccctggggcgcccgccttatcatgtctgccacataaatatccatcagcttgcgctgaatatccggcaccaaaagaaggcttttttccttcctgtactccaacaccgacgccggaaggccgccgataataaagtataagcgcagaagatacaaagccttttcatggctgctctttgtaaggggaagcattgttttataatgctctctgatctcttttgataaagctacttccatattcgcccagaggaattcctcgaagtccattgaaaaaagccgcacatgctgaatatccccgcacgcatagggaacgttcccgtcccaggctgcctcctgctcaatcactgccacatgataatccggcatatccaaatgaaaggtttccagacatccccgggcttccggaaccgcctgcatctcatccaggatcaccaaagtctccccaggcagaatcttttgctggtaatagctctccaaaaatctcagaatctgctccggctctggatgcttccgaatatatccggaaatttccttatcggactccaggttcacataaaaagtatttttgtaatactgattcccaaagcttcgcaaggtccaagtcttcccagtctgacgccccccggacaccagcaacggcctcctgtccggggaccgcttccaggttaacaattgatcaaaaatttttcttcgcatataattcctcctttttttaaatttaaccttattatacggtaagattcgttaaatttcgacaattaattttgttaattagaacaaaacaagtattttggaggaaacctaaaatgtttgatggaaattttccaaggaattactatgtttcacgtgaaaattcgataaataagtacaaactcgagagtggtatgtagtcaattaagaggccgcaaaaataggtaataatgaaagaaaatgaaaaaaatacagggatggcagcttcatttattagatgattagatgtatttcgtaaataaaacaagataattagaagaaaaaaagacttcctggatttttccacagttattgttaatttctcttttgtgcagaatctattttgaaatttatcgggcttcctaagtaaaaaagtagtaaagatgatacttcccaaaggggaactataacatgacgaaaatgaaaaacacaaagaagggcatggcgaaaaaagcgttgagcatttcgctggtagcagcaatgctggccacttccaatgtgccggtttgggctgcctttgatgcggaggacccagctgatgtggctgtggaagcacagacctttgagacagaagctaccgctacagacgatattgtttctgatacagacaaccagcttgtggagaaaccaattgttatatcagacgaaggaacggagttacaggatagtttatctacatatgaagtagttggcaacgttgaattaaatccgactgtatggggcgagaatattactgtaaaagacagtgcgaaattacagtggtcaattgatggaaaagaagctgttgatattgtagatgctacaacagttgatggaattacatcagcaaaagcttattggaaaataaacggaataattccagcaacggatttgggtactgacctgttaactgctaaatggaatagtatttctaaaactacatcagaggctgactttggtaaaacatttcaattatttattgaggttgttgacactaatggaaacagccattatgtttccagtaatgaaatcaaattagaaaaaaaggatatatctaatcttacatttacctggcctagttcaccaaaatacacgggagaatctcacgaacttgtgccgacagccattaataatggagaattatctgactataaatttaggtacgcttatgatggcgataccgttaactcaggaaagactttcgtagttactgcgactccccaagatgaaaaatatacaggtacgattgttgcagttgatccatacagcattctcaaagccgataaggcaaccaatgatatgattaaagtatcagcaaaagagggcctctctgtagaatatcttggagctaatgcaacaggaattccaattgatactaaaaatattacagttactgatgttaaaacaaatgcagactattccaagtcagttgcaactgctgtaataaattctaaagttgaggtgggtaaggagtatgatgttactgttaccctggacaaagatcaagaagatcttacatccaattttgctgatgtagaaagttcttacactgcaataaataaggtttctgtaactgcattaaatttatccaattgcaccatttctgtagggacagatcaatttattgctggtactaccgttaacgaatcaagcttaggctcaattacaattaaagacaagttaggtcaggaactcagcaatttgaccaaaggcgcagattatacagtagaagtgcaggcaaatgcgggaaaggtcggcacttatacggtaactgttaagggcgatggaaaaaatgtcattgggtccacaaatacaaatttctatataagcgaaagtgctcttacaggagcaacttttgtagataatgatggctatgcaacagcagttgaacaatatacaggtgcagccgtagttaaagacgagagcaaattaaataaattaaaattatctacgggtaatacagtcttagagttaggcaaaaactatacaattgagtataaaaataacacaaatgccggtcaagctgaaatttgggtaaaaggtcttggaatttatgcaggaagtactgtaaaggctgcagagtttactatagcccccgctacgattactgctacagatgtgacagtaaacccaagtattcttttcaatgcttctacaaaaccagaggattatgcagaagcaattgcactttctgtcaaagctaaaaatggcgctacccctgcaaaagaatttgatttaaaggaaggtaaggatgcggattatactgttgaatacagttggtcaaaagatataaatggaacaactgttggcgatggcagtatagaacagtatgtcaaagtagttgtcaatattatcaatgataactttaatggtggtgctacaagctttacaaaatatgtaaaactctctaaaccctctattaaagacgctgatattcagttagatcagtcagaatatacttataccggtattggaatcaaaccaatttataaagttgttgtcaacggaaaagaattgaaaaagagtgttgattatgaagaggttaaggtatccaatggaattaatgtaggaactgctactttatatatcaaaggtatgggagattttgatgccgctgaagcaaaagctgaatttactatcacacctgccaaggccgaagatgtcgttataagtgtgaatgataatgatcttccaacatatgacggaacacagagaaaagtcactatgtttgctgttaaattaaacggaaatgatattacaactcagtttgatactgcaaagactgtatatggtgacaatattaacgccggaaaagatgcaggatttatgactcttgtaccaaaggatagttacaagaataactttgaaggaactgtaagcggaaaatttgatataaaacaggctccgcttagcgggaccctggcaatctacgataaaaacggatttgagattacaaataatgcaactaaacttacttttgaagcagacggaacagccaagacatttgaaaaggttgtatttactccaacaataactggaaagatgaaatgcgtagaaggaaaagattatgttgttgattactataacaacattgatgctggaactgcatacgtatatgctcaggctgtcaaggatggaaactatactgttgattataatgctagtaattcagttcttcctgtaggtgcggctgaaaataaagcagaagtaagctatattgcagataaggcaaacttcacaattaaaaacttaatctttactaaaaatgacataagcgtagaaaatggcacttacgctgcagggcttgctgtaaaacctgttgttaaagtggttgtgtcaactaaggaacttactgagggtaaagattatgaggttgtaactgacaaagaaacagaagttactaagggaaaaactcttacattaacgattaatggacttggaaaatataaaggtgttaaacttgaggatattccttggggaattgataaaaagagcgtaaagagtcttgacatcaatgcgtccactgatcacaatggcaaagtagtactcacaataaaaaatggcgtgattcctgtagatgctgaaaaagaaggtatcaaagtctctgaagtaaaagatggtaaggtaactgtttctgctgaagaaacatccaaaaattatacaggttctgaggaagtaactgtagacaatgtaatggttccggtagtatctgcttctgtcaatagaaacgaaattgatgtaaccgtaacaaaagaagtggaaaatgctacagcatatgattttgttctgtgcgaatccgaagaggatctggccgcgttagatttcttcaaagctaataaaaatacagagggcacctcttctcaattcttgtttgtacgttctggaagctacaaagtatatgcaagagcaattaagagagatgctgacggaaagaagaactattccgactggtcagaagctaccaatgtaacaattgctacagatactccaaatgctgctgtaattaacaaggtaagcgtaaacggaaacaaagtaaccgtaaccttcacacctggtgcacgtactcagggtgtggacgtaatgcttggtcagaccctgcgttccagcaatggagaaccccaacgtcctgttacctccaactttactaagtatctgcagaaaaatcagagtgcttcctatggaaagaaacagactataacctttactaatgtagcaaaaggtactcactatattggtgttcatccatacattacagataatgacggactgaaatacttcggtcgctggtctaaacagactacagcaacaaaggttgttatcaaataatttgtttgggtagttataaagattcctacaagaaagagccattgcaaaatagataaataattatctatggagcaatggctccttcttcataccccaaaaacgaaaaaggtctcaattaattttatactcaaaacgtgctatgtagatctatggtgctaattatcttatatatttagattaccccaaaaaaatattcggcaaatattcagtcggcagaagtcacgctcctgttttttcctatccgctatacttctggctaattaaagatcttcttaatagccacttgtagtttgctacacctggaagtaaatacctgcggctggacttacatcggtgagactagcatagtacttagcatgcatgcgaaaaaccctggcttgattgccagggtttttcttgtaggaatctttataattacccaaatggactatttgacaacaacctttgttgctgtactctgtttggaccaacggccaaaatatttaagtccatcattgctggtgatataaggatgaacaccaatataatgggttccctttgctacgtttgtaaaggtaacagtctgtttattaccataagctgcattcagattcttctgaaggtacttggtaaagttgctggtgacaggacgctggggttccccattgctggaacgaagggtctgtccaagcattacgtccacgccttcagtacgtgcgcctggtgtgaaggttacggttactttatttccatttacagaaaccttgttgataacagcagcgtttggtgtgtcagttgtgatagttacatctgttgcttctgaccaatcagaataactcttccttccatctgcatcacggataatggctcttgcatataccttatagcttccggatcttacaaacaggaactgagaagaggtaccttctgcatttttattagctttaaagaaatcaagagctgctaaatcttcttccgatttgcataaaacgtagtcatatgcggttgctttttcaacatccttatccacaattacattaattgtatttcgatctgcggtggctgaaataacgggaactgcaacttcatccacagctacctctacagaacctgtatagtttttgctagtttcatcagcagaaacggtcacttttccatccttgacctcagatgcattaatcttctctttttcagtatctactgggagaacaccattcttcactgtaagaactacttttccatccttgtcagtagtcgctttaatatcaagatcgtttacgtcttttttgtctacaccccaagcgatatcttcaacttttgttcccttatactgtcctaaaccattgactgttaattttaatgttttacccacagtagtctctatctgagtatctggggttaaaacaacctcataatctttaccttctgttagtttctgtccctttgttccatatacaacaacttctggtttaacaaccaaaccaccggcataggtagcattttttacgtcaatgtcctttttctcaaaggtatcacctttaatatcaaaagcaactaaattgacgatatttgtaacgtctgcatcctctgccttagtagcagttgcgggtaatgctgtcactcctttattaaaggcaagctcaaagtttggattgataatctggatatagacatatgcatctgcacccttgtttgtagcatctacattattgtaatatcctactacgtaatcgatgccttctttgaatttcttagtggcaaccttggaatcattcactttaacagtcgcattgattctgtcaaaggtttgttctgtaccatcggctacaaattttgttgtgttaccagtataatcagccgtcttaagggcaatcccgtatttatcctgtaatactaattctaaatcatttgtatttaaaggggcttttttaatggtaaaggttaccgttttagtattcttaaagttcttattactgtcgacgggtttaagaaccaaggcagcttcaccggcattgatattgttttcgtattttgtggtatcaatttcaaattgctttgatacatctactttaccaagtttaatacttgtaatatcagttattgctggttcttgtttatttccattatatattgtgctatatgcttccatatcgacagttaaatcattagcatccgcctgctcaatgacaaactcggccgtagcttctgactgactggaatatccgccagcatcaattcctttaatagtaatagaaccttttcctgcattaattccggtctgttttacaacggtatagtttttgtctttctccaatgttacaccatcaacaattacatcgtaatctaaatcaatagctccgccagtatatgtataagaacctttgatcttgatatcgctatctgcaattgcctttttagtggccttaactgttgtaaactctattacttcaccttttgttccgaaattgttgttcagtaatactaatttaattttaatagtgtcatttgtgttgattgcaccgtcttctgcattatttttatcagttagagtcaaattataatcgacgccctccaccattttcacctgtttggttccgcttgctgtatccttagcagcgataacctccagtccggcagcaacggcatctttataatccttagctttagctccttctacgtatggtactgttttaggaactgtactcaatgataattgtggatcaatcttttcaatatcaaatgtaaaaacttttttgcttcctttataaccggcactgattccagttacaataatctgtccttcgcctacatccttattagtaccgtaggttacggtatagtttgcatctaaatcaataactatcttaccattttgaagtctggtaacgtaatctttaagctggtcttcaccaatgctttctccggtataatagaacttatcctttagctttcctttatcagatgctgaaatccatgttttgcttgatgtatcatatttatagaattcaaaattatcaaagccggaatttacaacttctacagtagtggaaatgctgtttgtaagctttgttgtatcagaggttttaactgttacaatatactttccagcagaaccgtcatttgcattgccgtcttcccttgtaatagctactgtatatgcggactcttcaaatgctatggcatttccgtcggcatcagtgaaagaaataccgccaagatcaccttctgcaattgctcctgttttagaatttatgaggttgtttccaacggaaactttacagtgtgctaaatctctggctacgacttttgcctttttagttgtagaatactccgtcttaactgcattgtaattctgttctaatagagaattcttttttgcttccaatacaacaatcgcttctttttcggttgcatacgtggaaaggtcaacctttacagcttttatactatcatcataagactgtttggaatcatctgtaaccgtaacagagtcaacaggaagtacaacattccccttggcatattccacggtaacattatcttttagttctgcttttaaaagattagcactgctatcatctacactcttaatagtataaacaccctttgccataccagtatattttgtattagtggtgttaggtgtaatagcaatttcctttgtgccggcatttacggtatcctggctataagtataaacagcgtctgttaaatctggagtgatgtctgttccatttaaatcaatttttgtaactgttacttcatctgccccatgagattttccatcatagtcaacactagaattatttactgttacagtcgcaccgctgatatcaacagcatttacattaactccataagtctgttcccacgtcttaccgtcagtaaaaacaaccttgattactaatgtaatattttttccaaagtttgcttctgcagccgcactctctaatttaatgctggctacatctttatccgttgcatccgtaaaatctgctccagcagtggtgccatcatcagaattgatagcggttccgtcagcctgaaatacatactgcactttatctacagaggtacttgtctttacatcttcctctgcttttccatctacggataccatgattttggaactactatctatctggatatcctctttccatgttttatccgtaggcaattttacagacggtgtaacagaataattcgtgtcatcaacagcataggtttcaggttcttcctctatgagatccagagcttcagaggcaggggcaaaatcttctacagtcggttcctctgccgcaaacccctctgcttctgcgactgctgcgtcaccaaaatcagcagcccaaaccggcacattagaagtggccagcattgctgctaccagcgaaatgctcaacgcttttttcgccatgcccttctttgtgtttttcattttcgtcatgttatagttcccctttgggaaatagatagtttattgggggactatttttgtatgctgcatttgccgtgactgccgtcctggatatttctttgctcatttttaagaatagtaaaagcggatttgctgtacttaatcacagttatccggcttttattgcttgatgcagtttcccctgaaatggaaaacagcccctgccgcctggttctggcggacaggagctgtctctgtttttcttatagtttttttaccatgcatactttctggcagaagcagatcccataagagactacctgatagccttcctggaccagttccctctggtaatcccttttccgtatctgttccagcgcctcttcacaggctgcttccatctgggagaaggccttcacacttttcagctccatcaccaccgccgggtgctggggcctccttggcttcagcagcaggtccggtcttcctgtccctgattcccggtttgacagcacccggtagtcatccaggttctttaggacacctgccaggaatccatggtagaagtcctcccggtaatcataatagctgatgctctccataagctggtctgtcagctccctctccagggcagtacagtcccctgtctccagggccttcccaaggacggacaggtcggtctgtctcatccggtcatcgaaccattccaggataaaccgctggtagatgtagcggatctcccggttggggaacgacagcacaccgtaacagatatccccgtcccagtattgtctttcaatcttcaggtatccggtaaacagcaggaaattccataggttatcgctggaggaggtcatatcctcataggtgatatcctccttcagaggcttttctatagatttccctgccatgagctcctcgatatcgtcccgttcccggatgtccgcatgttcgatcatcctcttcacaatgttgttggagctcacattggaccagaagggacggggatgggcctgggggttcgccagcaggctgtccgtaaagttcaccacgctccagggattgtagacctccttgccgccgaaaagatagccatcataccattcctgcatgaccggaaaggcttcctgccgcccataatagtgcagcatggcctgtacctcctcttgtaggaagccgaaatattccccgtagctctcgttcaggatggagatcatgttcaggttatttaatcccgtgaaaatactctccttggtaatacgcagacagccagtgatcacagcgaattcaaggttctcgttggtcttcagagcggactcaaacagggagcggataaaaccgatcatctggtcataaaaaccgcagaaatatgcattctcaaggggcacgtcatattcgtctataaggataattactttgctggtataatatatggagaggcactcagataaaaaagcaattgcatctagatagaggcttaaactgtctttttcctccataatttcaatatatctttttcgttgtgtctctggaaggcattccacaatatcttgatgcctccggtattcttttgataactgtctgcgcaacattgtataagccagtccccaatctgcctgtttggcagatttaaaggatagatttatcacagggtatttctgcaactggcctagatatttataccccgcatttaaaattttcattccttcaaatagcttctgattttcagtgttcagttctatatttccagtatcctcaaaaaaatactgaagcatgcttaaattcaatgtttttccaaaactacggggacgagtgaacagattgacctccgcttttttatccaaaagttctttaataaaaagtgtcttgtcaacataataatagccattttcgatgacctttttgtaatcatccactccgataggcaatggtttatattccatgtgtgatcccctccctgattactgtaaatcaatttatatcataacgtccatatactgctctaaatatctgcagaaaaatgtgggcaataaactacttccgcaaatcgtgaactgcaataaagcaaattacttggtcatctggtcaaacaaaagtatatatgctttttgtatttctttaatccagcttttgtacagcacattcttttttataaaaacagatcccatatgccaggatatttcgataaccttcttttctcaatccttctacatattttctttcctcgatttgtcttaaagcttgtgtgcattttttttcaagttcctgataggaatcagcaacttttaattccaaaataaccgcctgtccctttcttgaaggtgggcacaatagaatgtctggacggccttccccttgttcacgattggaataaaccaaatagtctttcaaattttttagtattccagttaaaaagccatggtagtaactttctgcataatcataaaaactgatggtatccaaaagtatctgggacagctggtcttccaattttctagtatttccgttaaataagctttcaaaaagctgggacaaatctcttaaattcaatgaatgatcaaaccagctccttactgtatttttatagatatactgtatctcaagatttgggatagcaagagtaacatactgggattcctccttcaaataccttccggtctgtttcaggtatccagtaaaaaataaaaaattccataagttgtcttcggaagcatagacatcctcataggtaatatcctcatgaaccggtttctcaattgtgcccccttctatcaaacgttccacctcatcccgttcctgtataccggaatgttcgatgagctcctttacaatgttatttgagctggtgtttgaccagtaaggacaaggtaatgcattaggactggctaccagtgcctttacataatttataatgctccatggattgtacacctcggtattgccaaacagatagccatcgtaccattggcggaccagcaaagacttggaagagcatctatagtatctcaacatttcatctacttcctgctggataaagccaaaatattctccataatcttcatttaagatagaaatggcctccaggttattcagaccagtaaatatggattcctttgaaattctcagacagccagtaataactgcgaattccatgctattattcgtctttagcgcggattcaaacagggagcggataaattgaaccatttcttcataaaagccacagaaatatgcgttttctaaaggtacatcgtactcatcaatcaaaaagattacctttttcccatggtattttttcatacaataggaaagaaattccagagaagtacaataatcctcctgggcggcctttctttttgccagattcaggaatttctctttatcctcgggcaattccagagcaccaaggatttccagattttctgcaaactggcgtgagatcgtctcgcagatacaataataagactgcttccaatccggctgcttggcagatttcaatgacaaatggactaccgggtagttctgcatttctcgtaaatatttatctccagcctccaggatcttctttccctgaaaaaggccatggttctcttcattgctttttttatcaccagtgttttgaaagaaatattggagcatgctcaagcacagtgttttgccaaaacgccggggtcttgtgaaaagatttactttgctctttttatcgatcagttccttgatcataagagtcttatccacatagtaatatccgttctgtatgatctccttaaaatcctcaatgccgatgggcaaggctttctgttccatttttaccaccaccctttcatggaatcattataacagaaaacactggtgaaggataggttccccaatagaagtctgaactttcttttctataagcatcaatcagcagtgataaacaagaataataagtcttttgatgattatagtatctttaaatctcaccaccatgaggtgggtatgccagcctagctgatgatttagtaacaatcacaatagaatgtagcatatccaccgcccaaaggggaactataacatgacgaaaatgaaaaacacaaagaagggcatggcgaaaaaagcgttgagcatttcgctggtagcagcaatgctggccacttccaatgtgccggtttgggctgcctttgaatcggaggatccagctgatgtggctgtggaagcacaggtatttgatgctgaagaaccggttgcaaatgaggttgctcctgtattagaagataatggtgctgaggtcaaagcaaatgccattacaggatcaattactgttcctaccagcattacctttaacactgaattaaaacccacgtataatattaccaagccagaatctacaaccttaaaatatcagtggcaggtaaaggaagcaggaagtgatacttggaaaaatgcaaccaaacttgcaaatggtgaggcttatacagtaacttatgcaccaatagtcggcgggcaaatccgtgttgtagtgtatgtaagtgatcctgcagtagatggaatatattccgatgctattaatgtggcaccaatcgttttaaattctaatgaaattcaggttactataagtaatacttttaaagcaacatatacccaaggtaaagcttggaaacctgaaaaaaaggatttggaaataaagattgataaagacagagatggtagttttgccgatgaaacaaagcttactgatgattcatacgaaattacaggatatggtgaaaatatcagtgtatcaggaagcgttacaatatcattagttgaaaaagtcgttggatacagcggaaccgctacagccacttttgccatagagggtgtaactggtaacttcactgtagaaaaacctgatgatccttccacgcaagagtatacttatacaggaaaggaaattataccttctggaatcgtagtcaaaaattcacagaacggagctactttagttaatggagttgattatgaagtacagcccttgactgataaaaaagtgggggattattttgtaaagattgttggaaagggttcctacctaggatacgaagcagttagccagtggaaagccaaaattgttcctaaggatattgctacctgtcgagtagaaattattccaaagacagccactaaggaaacagaaataaaagtttatgatgattccattaatccagacataccattagctgggcatatatctgataagaccgaatctggcgatgtttatcaatacacattaatcaatgatggcgagcctaatgttgatgcaattgttaaaattgatgcgattagttctggcacaaacaattacaaaggatcaattacaaagacatacagcaatgcaaaaattgatattaattccttaaaagcttttataggagaattaaaaactggaacctactacggttcagatgcctacaacaactcagctgcatccatttttaatggcgagaaacacaatcctattccggcaggagcaagttttggaggattaattgttggcagagactttactgcagaagttgtgtccggcggaacagatgtaggaaaaatgggtgtcaagttcactggtattggttcctatgaaggagtttatacttatgaaggttatgaggttaaaccattagacttaacagccaataacagtttattgacaataacacctcaaagtaaagctcaaaatatttattatgatccaagcataaaagatgccagtggaaaagatggttcttcaaatattgcaaactatcaaacccctgcatacaaaattgtgataaagtcaacgggttatgagttaaaagagggaattgattattatctgtccagaactaatattgatgctagtacactcaccttgcaggcagtgacagcacagcagacagatagcgacggaaaagttatatttagcacaagtaccaattttacaaatacaacagagaaagttacctatacattagcagctaaaaatattcaagatacggatgttattgttgataaaattgcagatcagccatttacaggaaatgctgtccgccctgctgtaacacttacttataaaggtatcaagtatgtaagtgatgaagaatacaaaaaagtagaaggcaccacagtacagtcttcttatcggaagtttagtgagcactttaccactagctataccaataatgttgcgttaggaaccgatactgcttctgtaacaattacggcaaaaactactactccattatcctttacagggtctaaaacaataaaattcagcattgttggtgctacgctggaaggcggctcgattgttaatgccgttgacaagaaaacagatctcccgagtgttgcttatgataaagctcttgctgagagtaaagagggtattgttcttgcaaaggataaatatcttatcttagataagagcggaaatgtcgttccggataaatactatgatgtaagttttgccaataataaatctgtaggtactgctactatcactatcactggaaaaaatggatatacaggcaccctaactggctcgtataaaattgctgcaaacggactcccattagagacaataactatgacaggtgttgcagatactcatgtgtatactggaagcgatgttactttaactaaagatgttgattacaccttagctggcaagctagcagagttaaaagaaggcattgattatacagtaaaatatgaaaacaatatcaatgccggcatagcaaccatgattatccagggtatcaatagctactatggacagttcaaaaagacatttgagataaaaccagtagctatttcaaaacagaacatctctgtaggtgatgcaggatacgctgccggacaggaagttaaaccatccgttgttatttccgttcctggaacctccaacaccttaaaagagggcgtggattataccttagagtatgctgcagctaaagaagttggaaaaaccggtaccatcaccattaactacaatacagacaccaaaaaaggccctgtaaacgtagacactaccaaatctgtcaacaaggttacctataccgtgaccgcaatggatctggcagatgtggccatcaatgacattgaagaccagaaagccaccggcgagcaggtaaaacctgcagttaccgttatgaacggcaacatccgtttagtggaaggcacggactatgaggtagtatacggtgacaatgtggaagcaggcgaaggaaccgtgactatcaaggcactttcttccaacaagaattacaccggagagcagacaaagaaattcaatatcgtaaaagatctttccgaatccgctcctgttatctccgctgcccttaaccgtaatgaaatcgatgtaaccgtagatgaggccgtagaaggagcaactgcatatgactatgttctgtgcagaagtgaagaagatctggctgctttagatttcttcaaatccaacagaaacgtggaaggcaccgcatcttccttcttatttgtaagagcaggtgaatacaaggtatacgcaagagcaatcgtgcgcgatgaagacggcaaaaagtcctattccgactggtcagaagccgcagatgtaagcattaccacggaaaccccgaacgctgccgtgatcaataaagtaagcgtaagcgggaacaaggtgaccgtgacctttacaccaggtgcacgtacccagggtgtggacgtaatgcttggacagaccctgcgttccagcaacggagagccccagcgtcctgtaacgtctagctttaacaagtacctgaagaagaacctgagtgccgcatacggaaagaaacagagcgttacctttaccaacgtggcaaaaggaacccactacatcggtgtacatccgtatatcatgagcagcgacgaactgaaatacttcggccgctggtcccagcagagcacagcaaccaaggttgttatcaaataatccgtttgggtaattataaagattcctgcgaaaggtccccggcatttgtgccggggatctttactttatacaggaaatataattagatttatttgaaatgatggttgctagttgattatacatcgtaccattaaacacaggctcagaaattatctttgcgtattatgatcttatatctatagtatctttaacaatcttatctctccaatagtctatggctttcttaatacttataatcattcctgattattgtataaagcagtgtaatgtaccgggaatatttagaagtcgtctgcaatagttcttaaatggcgacaaatttctccatctttctggcatctggttcttctaatttctactgctcttttaattctttaataatctgaacatgcttggactcatagagtttaaggaagaaaactaattggataataccttctgtctagtagcagtactggccctttatttggtaaataagaggaggatgcttggtcagtaaaacaaaaagcatgtataagatttaacatataaaagcgtttcattaagtatatgagcttcttacgaagcctcctgtttttcaagcagaattgtccggcttaaaagtagatattttttatatgaatgtaaaattctcttctgtttttgctgtaaaaggtttattgcatttctaacaagaacctttgggtagaaatctttatgctaatcccaatggattttttgataacaaccttaactgcagcgctctgctggaattaacgtccgaagtatttcagtccgtcaccgctgatagtgtgaggataaactacgatgtagaggggtgcttttgcaatattgatgaaagtcacagtttgcttcctatcggaagctgagttcgggttcttctgcggatacggggggctagtaacaggacgctaggctcttccccactgttatgaagaatctctccaagcattacatctatgccttctgtacgtgtgccaggtatgaaggttacacttaccttgtttccgcttacatacatattattagtaacagcaacatttagcgtattcgtgctgttagttatatcagtaacttttagccagactgaatggtctttttaccatccacaccacgggtaattgttcttttgtatacctaataatcaccggagcgtacaaacaagaactggaaagaagttccttctgtatttttatttactttggagaaacctaaagctgctaaatcatctttggatttacataaaatgaaatcatattcattatacttaataatagttatgaggctttttactgcttaatccagtttttcctgaaatggaaaacagcccctgccgcctggttctggcggacgggagctgtccctgcttttcttataatgttttcaccatgcatactttctgacagaagcagatcccataagagactatctgatagccttcctgggccagttccctctggtaatccctttttcgtatctgttccagcgcctcttcacaggccgcatccatctgagagaaagtccttacacttttcagctccatcacaaccgccgggtgttggggcctccttggcttcagcagcaggtccggccttcctgtccccgattcccggttcgacagcacccggtagtcatccaggttctttaggacacctgccagaaagccatggtagaagtcctcccggtaatcataataactaatgctctccataagctggtctgtcagctccctctccaggacgctacagtcccctgactccaaggccttcccaatgacagacaggtcggtctgtctcatccggtcatcgaaccattccaggatgaacctttggtagatgtagcggatctcccggttggggaacgacagcacaccgtaacagatatccccgtcccagtactgtctttcaatcttcaagtatccggtaaacagcaggaagttccataggttatcgctggaggaggtcatatcctcataggtgatatcctccttcagaggcttttctatggattcccctgccatgagctcctcgatatcgtcccggtcccggatatctgcatgttcgatcatcctcttcacaatattgtttgaactcacattggaccagaagggacggggatgggcctgggggttcgccagcaggctgtccgtaaagttcaccacgctccaggggttatagacctccttgccgccgaaaagatagccatcgtaccattcctgcatgaccgggaaggcttcctgccgcccgtaatagtgcagcatggactgtacctcctcctggaggaagccgaaatattccccgtagctttcgttcaggatggagatcatgttcaggttatttaatcccgtgaaaatactctcatttgtaatgcgcagacagccggtgatcacggcgaattccaggctctcgttgctcttcagggcggattcaaacagggagcggataaattgaaccatttcttcataaaagccacagaaatatgcgttttctaaaggtacatcgtactcatcaatcaaaaagattacctttttcccataatgttttttcatacaataggaaagaaattccagggaagtacaataatcctcctgggccgcctttctttttgccagattcaggaatttctctttatcctcgggcaattccagagcaccaaggatacccagattttctgcaaactggcgtgagattgtctcgcagatacaataataagactgtttccaatccggctgcttggcagattttagtgacaaatgaactactgggtatttctgcatttctcgtatatatttatctccagcctccaggatcttctttccctgaaaaaggccatggttctcttcattgctttttttatcaccagtgttttgaaagaaatattgcagcatgctcaagcacagtgttttgccaaaacgccggggtcttgtgaagagatttactttgctctttttatcgatcagttccttgatcataagggtcttatccacatagtaatatccgttctgtatgatctccttaaaatcctcaatgccgatgggcaaggctttctgttccatttttaccaccaccctttcatggaattattataacagaaaacactgatgaaggataggttccccaatagaagtctgaactttcttttctataagcatcaatcagcagtgataaacaagaataataagtcttttgatgattatagtatctttaaatctcaccgccatgaggtgggtatgccagcctagctgattatttagtaacaaccacaataaaatgtagcatatccaccacccaaaggggaactataacatgacgaaaatgaaaaacacaaagaagggcatggcgaaaaaagcgttgagcatttcgctggtagcagcaatgctggccacttccaatgtgccggtttgggctgcctttgaatcggaggacccagctgatgtggctgtggaagcacaggcttttgatgctgaacaaccggttgtagatgagattgcacccattacagagatgccagtaattgaagaagagggcacggaagcctatgcggttacagaagcaggtgatattcaagctacaattaagttagaaaaggatactattgaatggggaacagccatcacagtaaaagatgacggttcttctattataaacaaagttacaggaagcgatttagttaaatggaactatggttggcgtgaagcagggagcactgtagcatacgaaacaggttccgtagatactagtgccaacggaaagattgaagatatgactctttcagccgacaaagtaacttctgacatggcagggaaaactctggagctttatatttattatgttgagggcaagccagaatctgatgacagctttaacattcagcccactactattgctactgtaaaagtaaatccaaaaactattacgaaagataatattgatgtttcttttggtgaaaaaaaatctgcagaactagaatacaacggatttgaacaaaatggagctgatcaagtaactactattacattagctggaactaccctttataataaaactgatactgcaaatgcaaaagtaataatcggaggatcttctgctaaaaatgcaggggatgaatttaccataacaatttcagctgcggatccagcatatattggttctgtacaaaaagtattcacaatagctaaaagagaatgggatgctaatgatgtagttgcaacattgaaaacaggactcaaatatgagtatactggtaaaaaacttgagttaaatacctctgacgttgtgttaaaagaaaaaacaagcgaaaatggtggaaatttaagtggtgcagacttatcttcagcaattaaaaaggtagtggtaaaacaagacaatgaaggggctacaactattaatgatgcaggatatgatgctgtattgacattagataaaagtaaacttacaaattttgactttagtaaagctggagaaactataactgtagaaacagacggagaagtaaaatttgatgttattgccagagatttaagcaaaacagacattactataggagtgaataatgaagtcgaagcagaaacttcagtagatgatatgcaaattgcgttttcagctgacggcaaagaattaactcttgtaaaagacacagactatacagtaactgtcaaaaatagtaagggtgaagttgtaaaagaattctcaaatgaaggaaaatatactgctgagattactcacgctggcgataatactaaaaatagtaaaacagtaacattccgtgcagaaggcaatgtattagagtctgccactggaagcaaatttgatggctatgaggccgcctatacaggaaaagagattaaaccaaccaaagatgatataggtacattgaccgtgaatggtacggcaggagaaaaggaattagatgctaacgaatggagtatcataggatatggaaacaatacagatgtatctttaggtgccgatggaactgtgatagataaggcatatgtaacagttaaggttcttgctggtacatataaggataaaactgtaaaagtaccatttaccgttacaccgctctatgtagagacttcctatattactgttccaaagacagtagtatttgattcttctgttaagaaagctgccgactataatctagatgttactgttgtggcaaagaatgaaaatggaaaaggagcaatcacattaacttccaacgactacaaagtagattatgattttgttaaagtaggagctaaagatggcaatgtagtaggaaataaaatctctgcaaaaattacagtaactaataaaaactatcagggaaatgaggattccaaaactggaattgatgtagcctctgataagcaaaccaaaattgtaagccctgccctgcagagcagcagtgttaaagtaaatccagacacctatgtatatactggcggagctatcgaacctaagtttgtcgtcatggacggggaactagaattagaaaaagatgttgattacaaagtactcagcatcagtaatgccgtaaatgtaggcactggtacgattaaggtagaagggcaaggaaattattctgggcaggctactgcaaactttagcattactcccgcaagtgttgaagatgttaaggttacaattgatgatatgaaatataccggcaaaaaagtgcgtcccacaaaagataatatgaccattttgttaaacggcaatgacgtgtctagtcagtttgaaatttcagcatatggcaacaacattcaggctggaacaggagctggcagcgttactcttaaattaattaaggataacaagaactttactggcagcacaataactgttaatttcaatatatatcaagaaaaggtaaagggtactttaaaactctataattcttacggtgaagatattacagataaatattcaccagagaattatgacgaagatacctctacatttaaatatgacggtgaagaaaaaacttttgctgctgttaaaattaccgaattatcaaacgaagatggtgatcccaccaaagcaactgctgatgattttgagattaaatacgtagataatatttacggaaaagctcaaggtgatggtgatcctaatgtggcatatgtatatgcaattgcaaaagatggtgtgaattattccggatgtgcagacgatattgttactgcagatggaacagtaattaaaaatgttgttgcttcagccaagttttatatcaaatctccagtaataaatgaatctaacgttactgtgaagaatggtgtgtatgcttctggacttcctgttaaaccacaggttatcgtacagtttggcggcagtaatttagtagaggataaggattataccattgaagttgagacccatacagaggcaactgttggtaaagtctatgacttagtcatcaaaggaaaaggtggatatgctggaattactcctattgaaataggggaatcctggggaattgataaatttgattacaagaatgctgatattacggtaactaacggaaatgttagtgtaaagaatggaaatgtcaccgttccgtcaaaagattatgatacaaaaattaacgaaaacggtactattactatatcagccaaagcaaacagcaaaaactatacaggttctcagacagtaaaagctgaagttactgccgtaccagagattaatgtaacttatgatccgattgttgatcgtaaccaaattaatgtaactgttacacaggctgtacaggatgcaactgcgtatgattatgtactttgcgaaagtgaagccgacttagcagcactgaacttcttcaaagctaacaagggtgtagaagccgcttcttcacagttcctgtttgtaagagccggaagctacaaggtatacgcaagagcgatcacccgtgatgcagacggtaagaagacttactctgactggtccaaagcagcagatgtgaccatcagcaccgatactccaaatgcagccacaattaacagtgtgactgtaaacggaaataaagtgaccgtaaccttcacacctggcgcacgtaccgaaggcgtggacgttatgcttggacagaccctgcgtgcaggcagcaacggagagccccagcgtcctgttacttctagctttgccaagtacctgcagaagaatgtgaaagcaaccgctggaagaagacagacagtgaccttcaccaacgttgcaaagggaacccattatatcggagtacatccttacatcaacagcagtgaccagtacaagtacttcggccgttggtccaaacagactggcgcaacaaaaattgtcattaaataatctatttgggtaagtacaaagattcctacagaaggcccccggcagaaatgccgggggccttctcatacacagtcctataccagtttacgaatctcctcatagatccttctgcagttttcccggtcttggtaagcgaaaaatcgtctgcaccgttcccggtaggtctctttcatctcgcatccagtttccatataggctatcaacagagacaccgccgtttccagatcctctgccacttctccgaatccgtcctttttataatcaaaatatcccctgccataatggctgccgctgaagaattcctcccggtcaaactgaaaatatagaaccggcttgtcaagataagcgaaatcaaaggctaccgatgaataatctgtcacaagtaaactgctgtgggcgaacacctcccggtagcacacttcccggccgggcaccagtatccggctgtccaggcggaattcctccaggtgggggaggaacacggtatgaggaacgaactggacggcatagcccagccggtcggccgcctccaggagccttgggctgttcaggagtcccgtcacgttcttccggtaagtgctgcggtagaactcctgggtgagggggcggatatcgttcctgtcaggatcccccaccagttcatccctccaggtgggggcaaaggtgatgatcttcttcgtatccgaatacagccggtcatatctggccattccggtcaccgggagctgctcccgggaatagtggtaggccccctcaaggaaggcctcctgctccctgtgggaagcgcaggtgatcagatggaagcccttcacatactttccaatgctccgggagacatcattatgggtgaccccgtgctgaaggaacacttgtcttggccgggcgaggaagtcactgaaggcctgccgtgggagcagatccggctgccgcagggccctgggcatataggcgccgatattgcaggcgcataggagaagaaggcgcaggtgcttccgggagaggtaggggaccacctcgcctatccgggacagccgtttgaaatccggggaatccttttccaggatgaagactggccggatgcccttaggcctttgtgtgcacagccacaggaacagggcttccccattgtcgtccccccggaaggtcttgtcggaaatcagccagatgcttcttcctggaaagagacggagcaggctgcacaggagccttaggggcacagcctgatgcagggcagggtccgggcttctccacagggcctttaaaagtgcccgttcccggcgtatgagcagaagggggctgcaggtacagtagtttagttggccttcacggcagaaaaggacttttccatcttgtatagaataggaagactcccactggtccgccaggcagcaggtgctgcggaaatgcaggtccttccttttatgggcgccccggtccttttctttcagaataaaggataccgatccttccttcttttccaggggaatgcggaagtaaaagccatatactctgctgagggtttttccaaacaggtcctggttatggctggagcggtccacctccactggataaaagcgttctcctgccgattccacataaaatgcggtgacctgctgaaaacagagggtcacggcaaagccttcgattaccaggtgtccattttctatggtcagcaggtcaatgtatacagggagtgaatccaggtccagcagatgttccgggcaggcttctccctgggaacggaatctttcatacagcagataccgccgttggtaggaattgatcccgggtgccttacggatggcctttatatccaccatgtgggaaaaggaaaggatctcctgttcaaaaaggctatctgttctggtaagaagacattgaccgattccacgcagaatggaaacctgaatgtagagggggacagatccctcctgcttttgatagctctcgtaaggctccagcgcaaatttacggaagaaatcctccggccttccggtgggtagtcttaagcagcggtccggtgcctgaattagatatgcatttgaagccatataatactgtttggatatatcaaacacctgtatcagccagggacaggcagcatactcgccaaggatttcctgaaaagggcggtccctcagcagtgctgttttaaaaaacaggccgtataggctgtaaggctgggaagcataccggaccgtaaaatctatcttttccaattctggttcttctcttccggcgggactggggggaacagcccccggagaaagtgtggcgatccgcaggccgtccaggtggacattttttagtatctccagcactgtggccagggaaccaggatgaaaagcatccccctcctttaggaaacataggaactgcccctgggcacactgggctgcctggttgcgcagttgtaccagggaagccccggataacagctttaacgttttgtcatagctgtaattcgcatctttctgcttttgtaaatcagatctatttagcagaaacaagatttctacgtttttagatatataagtatgaaaatccgatcgtttttggaacagctccgcaaaggtgccgtctttcgtctcaatggcaatcgtaaggaggtattctgtggataactgcataaaagacttcctcctactgtacaatttcaacggtgaattctttacttaaaagttttctgcccatagttggcttgtcgtaaggaaggatggcaagtacaaaggattttcttcctaaagacagggtattggaatccacttgaagagtgatctttgcaatattatctgttaccttgcagttcttaattatagctgtgttctcgtccttatcttggaaaaagtaactgccgtcaatggtataaagccccagctgtttccagttccatgtggactgaactgcgaagaaaagaacatattgattatttccacgaaccagggttttatctaattggatctctgcattgataaggatgtcttttccaaaagtgcatgtataaaagtctttatccgtctttatggaaagctctggtttactttttaccacacatttacaggctgctttcacacgattgtttgctttggccgttatagtcaccgttcccgctttatgtgcagtgatcatccccttttggtctatcgaagcgatggctgcattactgctgctccagacaaccttatcggtgctgttcgttggtgtaagagcagcttttagtcctaaggcggcttcttccctgatggtaacagtctttttatttaggacaattttcttggcaggaatggatacttttacggtacattttgcctgagagccgttggctccttttacagttattacggaggaaccggctcctacagccttgataacccctttggaggttactgtcacagcctttttatttgaagtggaccaggtaataccagatacatacttagcaggtgttacagtggcttttagagtataacttttacccttttcaagagtaagagcagttttatttagtctgatagttacctcatcttttactacagtgttatattttccgtttccattggtgtcctgataaaattgaatgttgtttttttctttcacgactttgacactctttacggaggcagggatggtttttgatacagatgccgcgttattggaggcttttaccttcattccttttagattagtgcctttaatgatcaggctgtttcccgagggctgaagggaaatggtgcctttgttagagccagatacctcataggtgtgaaattgtccggaggttgttttatcatccgttaccttgatctggaaggcggaagaaattccttcaagggatacctgcttctttgcaccaaaaacaactttggtggctgctttagattgcacgctttgatagctgtcttgggtgtgcccctgaatagagatttcctcaggactgccgctttgggtggaaatcgagaccgggccattgtcagggagcacaatattcagaggaggcagctggctgcctgatgacagatcagaatcataagcataataggaaataattccatccccatctacgccgcagttgcccctgatcctccaagttttaccgctgtccatctgcctgagcaccaggtttgtccttgtatttacggttagttcctcttggtaattgtaaacattttcttccatatttttcacgtcgatttctttcagattgttcgtacatcttttcagataagccccggaatttgaggagtgggctccggaggtgtaataggcggggatttcccattgactggtcccttcattaaataaaagacaataatcctccgaaaagtttaccgcattgcagtcatagagaagaactctgcggttatactttttatagctgctgcgtgaagtaaagctgcctgtttccagggcatatcctaccactgcatgggcgccccagccatctacattgaagctaataaggacaggtgccccagaattttttaccttagaaacgctgtcctcaatttttcggagctgttcttttggagtgagccgcataaaactttgcacaactgagtttggaaccgacaaaagctgtgtaaattggtaatagccaagcagagatatcgtattgttgtttttgggaacctttctcaaattaggatagctggccactctgctgtcttttaaaatccccattttatttaagatcacggaaacggacattccgtaacagtagccatttcccatggaagttttgtaactgttaacccgggccctctccgaagggctcaattcatacagcaggctattccagtccttcgtggtaaaagggcatggtaccttcgtaaagttttggaaattccatatatcctttgaaaaatcaagctccttgctgtttttttgctgtcccgctatctttatggtgcctttcctgcttaataccagggtgttgctggctcctgcggaaaccgtataggaaaatacgccgtcctccttaaaataagagcgtttgatcagaatcttccaggtaaccgtgccggatttacctgctttcagggatggtaaggttttttgggaagtttctccggaagcaagacttcctgaagaaggaagcttgatattcgctgagacagccgttatctgagcatttttattctgattggcaatctttgcggtaatctggtaggtaaaggtggatgacgtggtggacaatagtttcgtggataaggaaattttaactggttccaggattacctgggccagctttagaaattcttcgatcagcttatccagggaattgacctcataatagcccatgttctgcagcttctttaggaaggacacggcggaagccttgtcaccggcatccatgccattgaaaagtccaagagtaaatatgcctgctgttcttttcaggaagactccgttggacaaggcagcattttttgccgcttcggtaacatatcccccggagttggtcggttcgccatcagtcatgaccaggacattttttaccatcacacccttaatttcagaaaaagagcgggctgcggactcaagagccaggtccatacgggttactcctgatgccctcatttcttttatggacttatccaatactgagaggttgttggtaaaagaagaggaagcttttacactggatgcaaaagtaataatcttgatcaggttcttggggttttcttgggtgattttgcggcagaatgcagaagcagccagcttaagcgcatccatacgggtctgtcccagggaataactgttcatgctgctggagcagtccaggagaagaacaattgcctgtcctccctccccagtgtttccagaggcgtcatattgatagggctcctgttggatctcaccatatgtctgtgcatactcgtcatggaagatggattctgggttacctgtattttcagagacagtaggagcattaggctgtccataagcagcctccagatcatattcgttatttactttagcagaagcctgtgaaaaaagttcttggtctgctgctaatgtattggtactttttgatataataggaaattcgcctgttatcaggatgactattgcaaagatcaggcttaaaaaacgtcttttcggtcccctcatacgcaccctcctcgtataataaatggtcttatgccaaagggcccctgcttattggcgggggccctcggtaggaatcttttgattacccaatttggattattttacggttataacggtggtgtcattctgtttggaccagcggccgaagtatttcagctcgtcactgctggtgatatatggatgtacgcccacataataggttcctgccttcacattcttgaaggtgacggattttgttttaacaggaacgttcttgatcaggttcttgccataagttacgggacgaagttcctcatccacgatacgtgtggcggttccaagcataacgtccactccctgtgtacgggcaccggtggtataggtcacggtgacattctttccgcttaccttcacatttgttacggttggagcgttcggtgtatctgtggtgatatctacagctacaggcttggaccagtcagaatagatcttcttgccgtccgcgtcacgcttaatagctcgtgcgtatacctgatactggccctctcttacaaagcggaacatgctggaggtctcgttaacgcttaagttgtatttgaaataattctgggctgcaaagtctgcctcgctcttgcacagcacgtaatcatactcggtggcattgtctacgaccttgacagaagcggataccatgttgcggtttgctgctgcggtaagctctggtgcagctaccttgaatgcatcttctacaatgttgaatttgatggtctgctcgcctacataattcttgttgctgtcaagggctttgatggtgacagtgccttcacctacttctttgttgtcgccataaacagcttcaaaatcaacaccttcggtcatctttacagaaccattcattacaaccagttctggtttgatctgctcgccggtcaccacctgatcctcgatggccttaatctctacattcttaaggtcttttgcgatgatattgtaattaatagtcagtgtattgttggttcctttaacaacatagttctttgtatccaggatagttacaagcgcttcacctttctccccaacatttacgccgctcttgtaggatacggtgaagtcggttccttctgtgagctctttgccgcttacaggatttttcacagtgatcttggactgtgcgatctggccgcctgcatattctgcgtctgcagcagttacatctgcacttgaaagatcagatttctggatgttgaatgcaaggcggatctgtccggcatagtttccgatacctcttgcaacaacatatggtcctgcatagtctgcagcatccaggtcttctttgccggttgccacaaagctgtttacgttatttacgtatgcgatttcgtaatctttgccctcttccagttttaaaggacttggagtgaatttcacttccggcttgatctcttctccagtgtatacctggtcagcaagcactgttttatcaaaggtaccattgatgagctggcctacaaccttaaaggtagaggtaagggttccttcataagagccgataccggtgactgtaacggttgcagttcctacattgatgttgttttcataggatactgtataatcacggccttgtaccagcttgttattgtttgcatctactacgaagaagtcttttgaaagagtgacagctttgccgtcattgtacatctggttcttcaggacttcatctgcagcagtataagcagaaaggtttccggtagttcctgctttatagttattgacaatcttgccgtctgccagggatttgctagtaatggagaaggtcttctgcagcttgtctacgtaacggccatttgtaccagttacagtcacagttgcagttccggtggctacattgttcttccactctactgtataatcggtgccttccaccaaagtatacttaccgttcaggtcagtgatcttcagctgcggtttgatcgccttgccggtccactgctggctgtcaatgtctgcgaactggatatcagaggacagaaggctcttggcggttattccaatctctactgtacggtcacctgtatagttgccatcgtcataataggcgccagtatcctggttctggctctgatgagcttttagggtgtattcaaaatgccccttggatgtatctttcttgtcattatttacccatgtaacaaacacatttgtatagtccttgccttctgccagggtctggccgttataggtaagcaccagtttgtccagggggttatatactggtttagcagtttcatttgttgccagggggttaaagatgatcagattcttgttagcctttacatcttcttcatttaagtccttcttttcaatattaaaatagaaggttctttcccctttatattttccaagcattttaatggttacgcttggagctggattgtcattatatcttccggcattcaggttattgttatatgtaaccgtataatcctgaccggcaacaagatactcgattccgtcttttttaccacttgctgtgtctacatagtgttttaatttgtttaaggtataagtatcttcgccctgcttccagctgtcaaaagtaatcttgctgccggaataagtttcacccataccggtagttttgtccatggctactttattcttggactggccgctctgcatatatacatcgcccttgatcgcagatgcaatctctgccaggaaagcagcaccacgggtaatctctgaaccttcaagttttgtagtatcagagaagatatcaccttttgcctcaactgtcaaagtggtgctcaggcttccgtagaagttctgattttcttcaaaatcagttgcactttttgccagaccttttactttaacggttgtatccattccagcttcggcttctttatttttgccgtcatcaatggtgaagtctttgttatctccgtcataatttggcagtttgattttacggccgtcagaggtggtataataaacctcgaaataatcattataattttctaaactgatttgtgtattggccgggcgtacggaatttcctacttttatatagctgttatctgctagattagccggtaaaacattgactttttcaaatgcagtataattatcagcatttccattgttaataattccactgtaggcaccaataccacggattattaccagtgcaccattaggcgctccatctatatcggactgtttaacaggtttggttacatctgaatgaattacttcaacgacgtaatcttttccagcttccaatacttttgttcccaatttaacctcagatacctctggaacaaagccttcgggattgtaggtataatctcttttcgcaagggtaaaggttgcatcagcaatatttaccgtgtttgtggatacctgaacgatcttctttcctacaaatggagaagaaagatcaaaggaaacgttctgagttcccactacagttgagtcaaagccggcaagcgtataatttaaatctttatttaataactggctatgaacagttactttaacggtttctagttctgcctttgttaaaacagtatgatcggttgtctcatgtgtttcaccatcagcgccggtataggtaattacaatatcctcagcatttactttttgaggttttactgcaagagcttcgctgtaagtggttttttcctctatttctccatttttatacacgactttaattcgcagaagataatctttgctatcattagaatttccgtttttaactaaattttgatccggtataaaatctttatttgtagcgctatcaatatctttccaattttgatctacagttgtatctaaagatgcatcacatttctgccattggtagcttaccgcatttcccagttctgtatcaagattagctgttaaagtggttccccactgtccatcccaggtacttccggctttcgtagttacagtggccaaagtattgtcaatagcacccttgctttcagtaatattaaacttaaattctgtctgaccggcgtaggtatatcccttccggaatgtaatactaccttcctgattacctttattggccgaattatagtttaatgtgtagtccacattctctactaattcctttttggtattagcatccgcttcaatatctgttgctttgattgtgagagaacctaaatcgtcatagcagatattaactgcctctgcactgctggcaacttccttgcccttaatatcaaagaagagttgctcgaagtcatacggaacattaacaatggcatatggagctatttcagtataccactgattaccctttttataagtgactcttgcaataagttcgtggccaatgtcctcacttttaatttcatagcttatttttggagattctgtatttacattctgtgatgcaacctcagttccgccaatttcatctctaaaaacattaatagcagcttcctgaattagtgttccgtctacaacaacatttgtttcaaatgtaactgtatctcctaagtaggctttatcagaatccacataaattgcatccggtacttgagcttgattttccaaaccggatgattcgacaacagtatcctccgccgcaaatgcatctatttgtgatgcttcaggtgtttcaacagaaatctgagctgggtcctccgattcaaaggcagcccaaaccggcacattggaagtggccagcattgctgctaccagcgaaatgctcaacgcttttttcgccatgcccttctttgtgtttttcattttcgtcatgttatagttcccctttgggcgctgacaatattacaacaataaaaattttccaataaattgaaaatttatcgagaacaatcttgataatatgtatatataactccaaataaatcgtatgaaacgattctttgtatatctatggttatatcaaatagaaaaacatggctttctatttctctactacctacggtgaaaaggagaatcttaatgctgttgaaaaatcagatacaaaggaataattaaagattacatggatttttgcaagcaaatagtatggatgaataaaaaatgaatagaaaagtacatccttttcggatggagatatggaaattcatttttgaataatagaatccgtcaaaatataggaatatgtatttattatgggaaggctgtattgggacagccctcccgctaggtttctttgaatacatgacaaaccatagtttcttttaaaatttttccagatccagttttttcaccagacagtcctttttgtaaaaacttattccataggccagaatatcctggtatccttctctgcgcaatgaatccgcatatttcttggacaaaatctggtccagtgccctttcacaggcattctccatttcttgataagcgcaggctattttcaattctagaataactgctcttcccctgacactgggagtttttaatataatatccggccggcctgtcccagactcccggttagaaaggatctgatatttcttcatattttttaaaagcccggcgagaaaaccatggtaatagctttctgcataatcatagaagcttatcgtttcctgaagctgggcggagatttcttccgccagcctttcttcctctccgttttccaatgccgtatacagactgctcaggtcttcaccctggacagtctgtgtaaaccaggaacggacagtatttttataaatatatcttacctctgcatttggtattgacatagaaatataccgctcctccccttgtaggaaaataccggtcgctttcagatatcctgtaaagaaaagaaaattccacagattatcctgcgaggcctcaatatcttcataagtaatatcctcatgcacgggcttcactatagtttccccagagatgaggctctcaatttccgctcttacggaaatatccgcattctcgattaggctgcgcacaatactgttagagctggtattagaccagtagggctggggcagggaatctggattccccataaggctgtccagataattaatcacactccagggattataaacctctaccctgccgaaaagatatccatcataccattcccttaccacgggacaggcatcctgccttccatattctcttaacatcttgtctacatcatcctgaagaaaaccaaaatattccccgtagctttcattaagaatagaaatgatcttgagattgttcaatcccgtaaaaatactttcctttgtaatcctcagacatcctgtgatgaccgcaaattccaggtactggttacttttcagagcggattcaaacagggaacggataaacccggtcatctgctgataaaatccggcaaaatatgcattttccagaggcacgtcatattcatctattaagattatcacatttttcccgtaaaatgtatggaggcattccgacaaaaaagcaattgcatccaggtaaatccccatgtctccctgttcagacaatatcttcaaatatctttccttttgaacaggggaaagcccttgcgcgatactttggtgcctctggtattctctggagatctgccggcaaagcatggtataagaaagcgtccaagtctcctgcttcgcagacttcagtgacaaactgatgacaggatatccattctgccgggaaaggtaccggtctgattcctttgtaatattcagcccttcaaacagggcagcatgttcttcattcacgcccggatctttagagtcctcaaaaaaatattgaagcatgcttaggttcagtgtctttccaaaacggcggggacgggtaaaaaggttcacctccgcttttttatcaagaagttcttttattaaaagggttttatccacatagtaataatcgttttggataacctttttaaaatcatccactccgataggtaatggcttttgttccataaatgattccctcccctttgttgaccatgtacttattgtatcagaaataaaggaatacggctaccgtgtgcgaaaaatactgataaaaaaaatagcagatagtttatataactgggtaataattatagaactcagttatatacacggttatgattcctatattaaacaagtagacttagtaatcgtaagaaaagttaaaagaaattttgaattgtaactaactatccaccgcccaaaggggaactataacatgacgaaaatgaaaaacacaaagaagggcatggcgaaaaaagcgttgagcatttcgctggtagcagcaatgctggccacttccaatgtgccggtttgggctgcctttgatgcggaggacccagctgatgtggctgtggaagcacaggtatttgatgctgaagaatcggttgtagatgaggttgctcctgctgagttgccagtagtggaggaagcaccggttgtttattctacagatgaatctataaataccaacaattatgtagaggaaaatttaaaagtagaagcaggcgcttgggagacagaaattacagccgctggaactatcaaagatacagacggaaatactgtagataatttaacttatatttggttagctgacggtgtacaggcagcaggccctggtgcaattacatctaatagaacaggagatttgtcacagattaaatatactcctgttatagaagactatggaaaagcattatccctgcagatcacaaagcaagagggcaatactactgtatataataagattattcaggcaggaactgtaaaagcaaaagatatttcatcagatttagatgctgctttggcgttcaatgcagttgagtataatggaaaggtacagtatgctgttcctacaaatacttatagtgcagttgccggtggaaaaaccataactgcagcagatattacgtggcattatgaccaaagaaataatgactttatcaatgcaacagatgttgacgcaactggaacggctgtcgagaatgataaagtatctgtatatggaacagttgatgggatatatggctacacaggtactactgcaaccggaaaatatgccattgctcaaaaaacaatttctgccgcagatttggaagttacgatgaaaaatacgtcatttgagtataccggagccgctattggattaaacagagatgatataactatcatggctgtatccaatgacgggaatacaaagaccgatattactgcggcattaaaagaaggggcatctattgtaacaggaaatgataccggtgccattggaaataactacgtagctagtattgatgtcaaaacggcatttgacactaccgaagaggccaaggcagtttacgcaaattataaactccctagcgatagcgttactgtaaacagtaaggatacttataaaattgttgcccgtaatctttctaattgtacagcagttattgttaacgattatgaattagatgtatttaaaacaagcaaaactgttgataagggagatattaaaataaccggaaaagatggaaaatcctttatggcaacagatgttgatttaaatctcaccataaataaagtagcatttgatgctgccaatgccgataagacaggccccattgaaaatgctattactatcagtgcagcaaaagacagtgcaaatttttccggttccgtaaatgccacacttgttttgacaacaagcagtttatccagtgcagttgttaaaactaccaagaccggtgctaatgcaacccttgataattcaaaaccaattgtaggaagtgctgctttaaaagttacttatacaggtaaggcttatgatttgaaaaaagactacggattaaaggtgaccgtaggttcaactgaattaaaatctggcgaatatactgttgagtatgatgataatattaatgctggtatagtaaaagccacaatcaagggtgctggcagctatgcaggcagtcagaagaccgtctactttgaaattggaaaagcagccatcactgatagtgatgtagagataactagtgcatcagcaattactattaatcccaacaataacagcgatgcttccttatacaaagatgattttaagcttgcaatcaaaaaagatttaaacggtgacaatgttaaggaaaccttaaaagagggaaccgattatactgttaaatatttttacggtaacagtaatacttctaccgtggaagatgggagcaatgtaaacggaaactttataatcgctaaaataacacttgttaaaaacggaaatttctcaggaaccttaagtaataaggcggttgtgattggtaaaaagtccatcaaagatgtgcagattaaagtaactcctgaaaaatatacatatacaggaaaatccatcacaccaaccgtagtagtaaccgatggcaactatgaacttgaaaaagacatagactacaaactaacagtaaaaaatgcaacaaatgtaggaaaagcaactgtaactattactgcgttatcttccagtgtagattatcaatccggaacaactgccagcactgattttgaaattgaagctgctaaagcagaagatgtaaaagtagagttggctcttacaagcagtagtccgattgcctcagcattcccttataccggaagacaaattcgccctgtagtaagagatgtaaaattaaacggcgtatctgtaaaagatgatttctcattcacctaccctgtatatggagacaataaagatgcaggtaaggaaatgggtacagttacaatctctccaaaaacatcaaatttcactggaactaagacccagacctttgatattcaaggtgaagtattaaatggtacattgaaagtctatgataaagaaaaccgtttgtttgatacagatgttgatggagaatacaaatatctgctaaacaggaatggcggtgtctacactgagcgatataacggtaaagagcatacctttaaaacagtattcactccaaccgatatcagtaaaaaattagtggaaggtactgattacgaaatccagtatttatataatgtagaagcgggaagatcctatttctttgcagttgctaaaggtaattacgaaggaactattactaaaacattttatactaatagcggtaaagtaactgttaagaatattattcctggcaccattcatgcatttagtattacaggcagtgaaatttatgcagaagatgttaccgtagaaaatggcgtgtacgcaggtggcttattagttaatcctaaagtatctgttgttgtaagtggggcaaaacttacagaaggtgttgactataaaatcaagacttggccaataaatacatctgataatacagttggcgtagttgccacaacaggtaagccttattatgtagaaattatccctatgggtggttatgatgcggcggaaaatttagaatttaaatggggcatcgacaaatttgaccttaaggatgcagacatcactgtaaaaggcaataccgttaccgttaagaatggcaatatcccggtttctgaagcagattatactgtaaaggacaacgaggatggaaccattaccgtaacagcaaaagaagacagtaagaactatacaggattccagaaggtggatgcaaacatcgtagatgtaccggagatcaccgctacctctgatccttccatagaccgtaacctaatcaatgtaaaggttaacaagacagtggcagatgcaaccgcatatgactatgttctgtgcaagagcgaagaagacctggcagccatgaacttcttcaaggctaacaagagtgtggacggcacatcctcccagttcctgtttgtacgttctggaagctacaaggtctatgcaagagccatcacccgtgacgcagacggaaagaagagctattctgactggtcacaggcagcagatgtaaccatcaatacggatacccccaacgctgcaaccatcaataaagtgacagtcagcggaaacaaggtgaccgttaccttcacaccaggcgcccgtacccagggtgtggacgtgatgcttggacagaccctgcgctccagcagctacggagagcctcagcgtcctgttaccaccagctttggcaagtacctgcagaagaatctgaatgcggatgcaggaaagagacagaccgtgacctttaccaatgttgcaaagggaacccattacatcggtgtacatccatacatcctgaacggggacggactgaaatacttcggccgctggtccaaacagagtgcagctacatcagttgtcatcaaataatccatttgggtaagtataaagattcctacagaagggaccccggcacagatgccggggtccttctcatagacatttttcaagatatgtctatgctcacttaaggcattcaattggcttgtgtacataagtggaggcagaaaatcattatttctgcccacgatttacatttcaaagaagacccttttgcctttaattctgcatctttttttataaaacgcaattccataccgtatggatgtagtatacccttcttgtgcaaatgctgtatcatattccttttcctgaatctgttgaagtgcatgatcagccatggattccatctgtccaaatgatctggcggtcttcagttcccaaattatgaccggctgctcctggtccatattttgaatcaggatatcataccttccatttccggattccctgtttgatttaatgatacatgtacgcatcctgcttagaatgcccagcataaatccatgatagaaggcttccgcatgatcataaaagctgatcgtttcctgcagcaggcttgttatttgtgcttgaagagcttccgtatccatatcccacattgcctgataaaggccagtcatatctgtttcctttgttttttcttcgaaccatcccctgatcttatctttatatatctcttgtatttcaatgtttggaatggagaatttcagatacagcttattgtctgccatgtactcttctgtttttgtcagatagcctgtaaaaaacaaaaaattccagaggttatccatagaggtatatacgtcctcataggttatgtcttcatgaaccggtttatcgatggtgccgccggctatcaaattttcaatctcaaaacgtgcggatgcatcggcatggtcaataagcgtgcgtatgatgctgttagagctggtatttgaccagtaaacttttggaagatccatcggatctgccgacagggcttttacatagttaacaatactccatggattatatacctgtgtatttccaaaaacatagccatcataccattgccggatcatctcctgcttattttcaatttggtaatcctgcaataccattgtcaattcgtcttgggtaaatccaaagtattcttcataggatttacttatgatggaaatgatctccaggttattgagccctgtaaaaattgattcttttgtaatacggaggcatccggtgatcaccgcaaaatacaaggatgagttggttttcagaaccgactcaaacagtgagcgtatataatctgccattttttggtaaaatcctgaaaaataagcgttttccagaggtacatcatattcatcgatcaagacaattacaggtttgtgataataagactctaggcattttgatagaaacgccagggcgtcgatataatcccccatctctcctgtctgctgcaggatccgttggtacctggaaaaatcataggtttccagagatttcattatctgttgatgacgttcgtattcctgtgcgatctgccgtttcagcatcaaaaaagccagctcccaggaaggctgtttcgatgatttaagtgatagagaaataaccggatacccattcatatgggaaaggtatttatcaccggcttccatgatcttcatcccccaaaatagtcttcgattttcctcatttgtatcttcatcacctgtatcctcaaaaaaataccggagcatactcatgtttaatgttttaccaaaacgccggggacgggtaaaaagggttacctctccctttttgtccagcagctctttgatcaaccatgttttatccacataatagtatccttctgaaattaactttttaaaatcatcgtatccaattggcagcggcttctgatccatctgttagtccctcctatgctcctagtatatcagaaatatgtaagcccggccagggagttttctgtcaaaaaatgagtatggtcacaaaacagccatggttacctccaaaaccaagaatagcctcattggttcagcactaatttgaattgctttaactttgttcgcttcatttgctcagaagttatccttgcgtgttacaattttatagccaggatattccttaacacgtttatctccccagtaatccaccgctttccaatactcctcatcatttctagttatcgtgtaaggcagggtgatatcccggtaatttttccatatccgtttcttgatactgtcttctaaggggtattccttgagaaaatgtccaagaacagccagaacccggtcttcaacggaaagattgctttcggtgagaggataaacatgggcttctgcttcccggatatacatgaactggtctgtgtcctccaagagctctatttcaaaataatccagcgcttccaggtactgtttgtttccaaaggtatagacgatctgctcttttttcttgcatttccaggaatccttcagggtatagggaataatgcgtactgtaaaatagagttcctgcagcatagggttctgaatcacaaaagcttggatccggggcatctggtcaatcctgctgaaatccagaccggagagaatcttatcctcaatgttttttacataagcttccatgacttctaacgaaatctctgtttcttcacattttgagactgtctgcagaagctcataaataacgacaaatttctccatccttctgggatctggttcttctaatccatactgctgtgttaattccttgatgatctgttcatgtctgggctgatagagcttaaaacagaaggcagattgaagggtatcttctgtccaatagcagtaccgctccttctcctgatagatgaaagaagtatgcttttcccttttagtaaaagcttgtccctggatatactttttggggatccccataatctttaatacatcccgtattttcatggcattacctccctggcttgattattgtatgtttatagaatgatctatgcgtgctggttttaaaatcatccgtatatctgtaattatataatagaaagatgtggtatgccagggattatccagttctatttgctttttcaaaaagaaattatgataaaaagtttcttccatcttgaaaaaggcccctggcagaaatgccgggggccttttggtaggaatcttatagttacccaaatagattatttaatgacaatttttgttgcgccggtctgttttgaccaacggccgaagtacttgtactggtcactgctgttgatgtatggatgtactccgatgtagtgggttccttttgcaacgttggtaaaggttactgtctgtcttcttccagcggttgctttcacattcttctggaggtacttggtaaagttagacgtaacaggacgctggggctctccgttgctgcctgcgcgcagggtctgtccaagcataacgtccacgccttcagtacgggcgccaggtgtaaaggttacggttaccttgtttccgcttacagtcacactgttgatggtagctgcatttggagtatcggtgctgatggtcacatctgccgctttagaccagtcagagtaagttttcttgccgtctgcatcacgggtgatagctcttgcgtataccttgtagcttccggctcttacaaacaggaactgggaagaaacagcttccacgctcttatttgccttgaggaaattcagagctgtcaaatcttcttcactttcacaaagaacataatcataggaagcgccttctatcggttttgttacagttacattgatggtatttctgtctacaacagggtcagaaattgctgtgatttcaggaactgcattcatttcagctttaacagtttggaaaccagtataattacggctgttttcctttgcggtaatggtaattgtaccatcatcattgtttttcacatcatagttaccctgtcctaccgtaatctcaccgtttttgacagtaggaacaccatcttttacagaaatttctgcatccttcaggttatatttgtcaattccccatttaaataatgctaagtttttaagcccaccctgattcatttctgcatttaaggtttcatatccaccctttccgtaaatcagaacagaatacggttttccagtagtggcatcggttccaacacttaaaatgttttgcaggtcaagattatccagattaatattatcgtcaattataccaccaatcagatctatgtttgctacgataatatcgtaatccacaccctgggttaagagtttcccgttggactttaccgtaaccttaggctgtacggaaagaccgcctgcgtaaataccgttttctactgtcatatcttccttgtagagcttgctacctttaatatcaaaagctttaatatctactacatttggaattgcaacaaatttcccagttgcaatatcaaaatagctgaaaataccatcttcacagttagctatttcgccaacatactccgtagcttcgccagcgtaattacctttcgcaataacaaggatatagcctgtccctgcatctacgttattaacatattttatttcataatccttaccttctacaacctttttatcagctggatcaaacaccgtctggaattcatgagcttcgccgttgtatcgttcagaagtatttagccttgcactctcttcatttgagactaactcgttagccttattataaactttaagggttccttccagtacatctgttacaatatcaaatttctgggttttgcttcccgtgaaattatctgtttttggagtaattgttacacttccagcatctttaccggcggtattgttctcacctaactcaagatgagcaatatcaaagtcatcgataacatcgacatcatttaatgtaatggatttgatatcatctttcgttacttttacttgttttccattgttgtaatagaacttatcctcaaatgtaacctccacatcctcagcctttgctgcctcaatctggaagttaacggttacactagtatttaagtcatattcatctgcctgaataggaacgattttaacggtaccctttccaacattcttagaattggttacttgaagagaatagtctacatccttttccagtacaagtgttccgtctgtaacggttaattctggaatgatagatttacctgtataagtgtaagtatcctgagctaattttacagttacattggcaaaagatttattgcggatttgtgtatagataaagatatcgtctcctgtataattaccattctttacaacactaattttagaaacgacataattacctgccacgttgtctccatctgcagttatactattgttatctttaccatagaaatacttcacggtataatccgtaccttcttttaaggttacttgtgaaccattggacagttctgtttttatagaaagtttaacagaatcggcatatttggatgcatccttattataggcagtatttatgtttactgcatcagcttgatctacatctatacctacatcatctagatcgacaggagtaattttaaaatatactactttggaacttgcagcataactggtacctgcagcccctttgattgtcattttgacaattcctgcattgatattgtcatcatactcaactgtatattcgttagattttaactctgtttcacccacacttataacaagttcatatttactgtcacctttcaaatcgtatgctttgttaataaaaggcaactctaaaatatcctcatcatttttattatctacaagtggtacgtccattattgatacggttgcagaggacaaagttctgtttgtaagtgtaagacttgcttttgcacttcctgtaaaccgttcatcttcctttgttcccgcaattgtaatggcattagcaatggttcccgtactgccatttttgatagcattgataaaactgctgctaaaagtcacatttaattcatttggaacataattaaataccacaccatcagagccaactatttcaatagaaccgcaaatagccgtttttaagtaatctgtagtaagatcttttaaactatctacttcaaaatcttttgtagcacgtactgtacaattgtttagattccttgccttaacagaataggtatttaaactattggttacatccttagtatttgtatcactatagttagccaggactttattagcctcttcagtatccgcaaaactatcatttggatcaaaagtagctttgaatcctgttcctacagcacctgcgtcatttccagtaatcttaatctcatcctttaatgcagcagtaatatcaacttttatatctccgataacagcgtccaacttaacatcttcttttcccaaagtaacacctgttgcacctgcgtattcaaatgatgtattctttaaagacagttcaaatgaatatgaatcagcttcggcaggtaagatatcatattctacattctctgtctgacctttataaccattcttatttactacaccgaatacggttattgggttttcttccgtaacatttacaaaatcattgtttttttgggaccactgccaggtaatatctgttggactaatatccccttcatcagttatactgcttgggttgagaaattcaggaacaatttgactgggttttccattaaaatatacatcatcaatatcctgtaatccagtaaaggtaacttcttttgcctgtactttaccagcagtaaatacatgctggtaatcaactgcaccaagtacattataatgaataaccttcagtgtaagagtcttgttgtagtcattaatggttggtttataggtgattttggataaacgacccccaaaatcattgcccttagcaccaacgccatcagcctgaactccatcagccatccacaggtagtcaaatccacttatctcattaccgatggaatccacaatactgccagtaattttaacaccttcgtcccactcgcctacagcaattttaacatctttctctttataattagcgttattgatttcttcaactggagctgcataggtatcgggttcctgagcaatttcagattctcctgctacatcaggagttatttcctcagcagtaaaggtttcagcctgtgactccacagtgggagtttccatggatggctcttcaaccacaatctgagctgggtcctccgcatcaaaggcagcccaaaccggcacattggaagtggccagcattgctgctaccagcgaaatgctcaacgcttttttcgccatgcccttctttgtgtttttcattttcgtcatgttatagttcccctttgggtggtggacagtttattggaggactatttttgtatgctgcatttgccgtcactgccgtcctggatatttctttgcttacttttaagaataataaaaacggatttgttgtatttaataacaattatctggctttttactgcttaatccaatttttcttgaaatggaaaacagcccctgccgccgggttctggcggacaggagctgtccctgtttttcttatagttttttcaccatgcatactttctgacagaagcagatcccataagagactatctgatagccttcctgggccagttccctctggtaatccctttttcgtatctgttccagcgcctcttcacaggccgcatccatctgagagaaagtccttacacttttcagctccatcacaaccgccgggtgttggggcctccttggcttcagcagcaggtccggccttcctgtccccgattcccggttcgacagcacccggtagtcatccaggttctttaggacacctgccaggaatccatggtagaagtcctcccggtaatcataatagctgatgctctccataagctggtctgtcagctccctctccaggacgctacagtcccctgactccaaggccttcccaaggacggacaggtcggtctgtctcatccggtcatcgaaccattccaggatgaacctttggtagatgtagcggatctcccggttggggaacgacaatacaccgtaacagatatccccttcccagtattgtctttcaatctttaagtatccggtaaacagcaggaagttccataggttatcgctggaggaggtcatatcttcataggtgatatcctccttcagaggcttttctatggatttccctgccatgagctcctcgatatcgtcccggtcccggatatctgcatgttcgatcatcctctttacaatgttgttggagctcacattggaccagaagggacgggggtgggcctgcgcgttcgccagcaggctgtctgtaaagttcaccacgctccagggattgtagacctccttgccgccaaaaagatagccatcgtaccattcctgcatgacagggaaggcttcctgccgcccgtaatagttcagcatggtctgtacctcctcctgtaggaaaccgaaatattccccatagctttcgttcaggatggagatcatgttcaggttatttaaccccgtgaaaatactctccttggtaatacgcagacagccagtgatcacggcaaattccaggttctcgtttgttttcagggcggattcaaacagggagcggataaaaccaatcatctggtcataaaaaccgcagaaatatgcattttcaaggggcacatcgtattcatctatgagaatgattacttttttctcataaatctgacagagacattcagacaggaagcttattgagtcaaggtagctacttatatctcccttctcattaatgattgcgtcaaagcgtattcgttgtacatcactaagtcccttaacaatatgaatatgcctacggaactcagcagctatctgccgttttaacatcgtataggatagttcccatgtatcttgttttgcggacttaagagacagactgatgagagggaaataagtctgctgtaaaagataggaactgccttctgaacaaatattcagtccatcaaaaagttttgcatgtttctggttatcaatagggtgtccggtatcttcaaaaaaatagcggagcatatttaaatttaaagtttttccaaaccggcgggggcgtgtaaaaaggttaactttcgctcctttatccaagagttcctttatcaggagagttttatccacatagtaatagccattctgtataatctccttaaaatcttctattccaataggcagccgtttctgcatgtataatccctcctatttcctgcactttatacttattgtagcaaatatattaggaaaccaccagctgtatttagggttttattattccatcaaagcagaagatatgtgcaaaaacaacaatattgtatacaaaacaactatggttatacctgtaaaaatatcccgattatcagtttttatgccagtaaaaaaacatacatgtttctaaaacaaccaaacaatagttgttacggattaataaaaatattaaaaaacaaactgtccaccacccaaaggggaactataacatgacgaaaatgaaaaacacaaagaagggcatggcgaaaaaagcgttgagcatttcgctggtagcagcaatgctggccacttccaatgtgccggtttgggctgcctttgaatcggaggacccagcaacaattgacaatgtgtctatttttgaaaattcagagactaatacggacaccacaactgaattattcagttctgaaaatgatgaggtaattgaaaacactggagctgaagctcaaattgacggatcccatatttggtccgattacaatgaaaccaaggttggagatacaattaatttcacaacaaatgtaaaaactacttctgaaatagatacggtttgcattgatttatatcgtaatgatgaaaaattctatggaggaacaattgaagatggaagccgtgtagaaggcgatgcaggaacctctccttcgtatacctataaaataacagaagaagacttggagagcgaattacaagcagtagtaacaataaggaatgctagtactaagggatgggaaagagtagctaacacttatatttacattaattacagtattatcaatgataaaaattatgatcagttatttttcaatgtaggtactacaactgtaagttctgctgaaacatttagtatttgctatgatgatgttgagaacattaagcttgctggtgcaaaagtagacggtattaaagtagatttaaaaaaaggtacagattacgaagtattgtatgatagaaacaataaaggttctcaagaaggaacgattcatttcctggctggaaatgggtattctagtgagcgggattacaaattcagtatttccgaaagcaaaggttcaattgacaatacgctggctaccgtaaccacaaaagctggaggtacatgggatggtcagtggggaaccattttaacagctacccttgatacagaacttggagaagctgtgaattatcagtggcaaaaatgtgattcatccttagatgcaactgtggatcaaaactgggaagacattgctgacgctaagaccaaagaatttgtaccagaccaaagtcttgtaaaaaatggaacgggaaataatattggtaaagactaccttctacgtgtcaaagttatttataaagatggtgaagtagaagaaaagactacttatagtcaagctcttgccgtaaaaccacagaaagtgaatgctgaggatatcaaaattactgtcgatggagaactcgtaactgacgatactgttttaacagaaacacagcttaaaaatgcagttgtttctgtcagaaatcaggaactggtaaaaggtagtggatataccattgcaggttttgatgaatcctttgtgggaacccagaatgtttcctttgatcttacttctccatttattggaaagaagatagttcaggtatcctcaaagacagtgaatatagccgatgcaacctttactcttgccaaaagagattatacctacaaccccgaaggttttgttcctgaagtatctgaggtaaaattaggcacgaagacactcacagcaggaatagattatgtggttgaagcgattactccagatgtaacagagtatgtaaaacagtctgatatcgtcggtgcacctaatggagcaattgtaaaaatcaaaggaattggtgcttatagtggatatatcaacaacaatgcggagaacgactatactgcttttgaaaaagtaaacgttctccctgctaatatagctgataacagctatataaaagttggaaattccgtacgcccggccaatacagaaatcggcttaggtaactatgaaaaatatttcgaggtttattatactacctctgatggccgcaaaatcaaactgcctaacaaaaatttcaccattgatgacggcaagaataaagaagccgaagctggaatggatacaactgttaaagtaaaaggtctggcaaaaagtgcaactgattttgaagaaaatcagaacttctacggaagcctgagcaccactttgacagttgaggcaaaaggtgatatcttctctgatactacacaacttgaaggttcagagattacccgtggagctgctttcctggcagagattgcatctgcgatcaagggcgatgtatatatgcagagcggccagtccaagaacaaagttgccatggacaaaactaccggtatgggtgaaacttattccggcagcaagattacttttgacagctggaagcagggcgaagatacttataccctaaacaaattaaaacactatgtagacacagcaagtgataaaaaagacggaatcgagtatcttgttgccggtcaggattatacggttacatataacaataacctgaatgccggaaaatacaataataacccagcaccaagtgtaactatcaagatgctgggcaaatataaaggtgaaagaaccttttacttcaatattgaaaagaaagagctatgggataatgatatacaagataacaagagcctgattatatttaatccattagcaacaaatgaaactgctaaaacggtgtataatccattggataaactggttcttacctataatggccagactttgatcgagggcaaggactacacaaatgtcttcgttagatgggtaaaaggagacgataaggatacctcaaagggagcgtttgaatataccttaaagtcacatcagagtcagaaccaggatactggcgactattatgacgatggcaattatacgggacaacgctggacagagattggaataaccgccaagagccttctgtcctctgatatccagttcgcagacattgacagccagcagtggaccggcaaggcgatcaaaccgcagctgaagatcactgacctgaacggtaaatatactttagtggaaggcaccgattatacagtagagtggaagaataatgtggccactggaactgcaactgtgactgtaactggtacaaatggccgttacgtagacaagctgcagaagaccttctccattacaagcaagtccctggcagacggcaagatcgtcaataactataaagcaggaactaccggaaacctttctgcttatactgctgcagatgaagtcctgaagaaccagatgtacaatgacggcaaagctgtcactctttcaaaagacttcttcgtagtagatgcaaacaataacaagctggtacaaggccgtgattatacagtatcctatgaaaacaacatcaatgtaggaacagcaaccgttactgtcaccggtatcggctcctatgaaggaacccttacctctacctttaaggttgtaggccagctcatcaatggtacctttgataaaacagtgcttgctgaccaggtatacactggagaagagatcaagccggaagtgaagttcactccaagtcctttaaaactggaagagggcaaagattacgaaatcgcatacgtaaataacgtaaacagctttgtggcaaccggaaaagaagacctggatgctgcagactatgcaggaccatacgttgttgcaagaggtatcggaaactatgccggacagatccgccttgcattcaacatccagaaatctgatctttcaagtgcagatgtaactgctgaagatgcagaatatgcaggcggccagatcgcacagtccaagatcactgtgaaaaatcctgtaagcggcaaagagctcacagaaggaaccgacttcaccgtatcctacaagagcggcgtaaatgttggggagaaaggtgaagcgcttgtaactatcctggatacaaagaactatgttgttaaaggaaccaacaatacactgacggttaattacaatatcatcgcaaaagaccttaagaatgtagagattaaggccatcgaggatcaggtggtgaccggcgagcagatcaaaccagaactggttgttatgaatggttctgtaaagatgaccgaaggtgttgattttgaggctgtttatggcgacaacaaagaagtaggtgaaggcactgtcaccatcaaagcccttgacagcaacaagaattatgtaggcgagcagaccgtcaaattcaatatcgtagaagatgcattcaaggtagctgcaccagagcttaccgcagctgcgaaccgcaacatggtatccgcttctgttaaagttgtagaaaatgcttccgagtatgattacgtactctgcaagagcgaggcagattttgcagcccagaattactttaaatacaacttaagcgttaacgagacctccagcatgttccgttttgtaagagaaggccagtatcaggtatacgcacgggccatcaagcgtgacgcggacggcaagaagatctattctgactggtccaaacctgtagctgtagatatcaccacagatacaccgaacgccccaaccgtaacaaatgtgaaggtgagcggaaagaatgtcaccgtgacctacaccaccggtgcccgtacacagggagtagacgttatgcttggaaccgccacacgtattgtggatgaggaacttcgtccggtaacttatggaaagaacctgatcaagaacgttcctgttaagacaaaatccgtcaccttcaagaatgtgaaggcaggaacctattatgtgggcgtacatccatacatcaccagcagtgatgagctgaaatacttcggccgctggtccaaacagaacgacaccactgttataactgtaaaataatccaaattgggtaatcaaaagattccgaccaaagggccccgccagtgcgcaggggccctttgatataaaataaaggaggacatccttatggaaccagagaacagatgccttcttaccctggcatttgaaaccgaggacccctcttttgtggaacggatacgggaactgcccagttcccatgtccttatgcagaagacggaggtccttattttgttaactgccccaggccctattaaagaaaccccggccagtctttcatcccatacttcggtccgcctgttatcgggaacgcctctggtctgtctccggaatgaggcagcccggtgtgccaaaggggaatacctgtgtttcttaaaagaagggcaatccttcaccccgggggcattgcccatgatcctggatatactggcggatgtccggcccgacggcctgcgcactgacctctttcctcccggcagcccatccggcagcgcctcatgcctggaagcaccggacctggaaaagatcgaccttgccgtccgatacgcctcccagccctgcagcctccggggtcttttcatccgcaccgtcctgctcagggacagccccttccaggagaacctgggagactgtgcccactggccttggctcatctggacctttgaccgctcctcacagtattacatgctccataatccctgtctttcctccatcccggaccctgtcccggtgccccctgccggaaagccgcccagggacttcttccggaaatttgttctggagccgtatgaacactatgaaaacccggacgggcgcgtccccctgtatgtacaggtgtccctcctgcgaagtattgggcagtgccttctctcctcccgggacagctcctttgaacagcaggtgctctcttttatccgaagggtagatataaaggccctgctgaaggcccccgggatcaactcctatcagcgtcgtttcctgctctatgagcggttccgctcccagggggcggactgccctctggacctgctggacctaggctccctgccggtgtacatcgatctgctcagagtcagggacggatgcctggagatagaaggcttcgccgtgtgcctctgcttccaggaggcagtcaagttctatgcgcaggcaggcggggaacgctggcatccccaggaggtggaccgctccagccatgaccagtacctcttcggaaggcctctgagccgggttcgaggcttctgtttccgtatccccctggcccggggggaagggaggataaccttcttcttggaggagaagggccggaccgcctatcaaagggaggacctgcatttccgcggtggctgctgtctggcggaccagtgggaggcctcctattccgtgcaggaagacagaatcctctcctgccgggacggagccttggtctaccagacctgcagcatctgtgcccacgcacgccgggagtgggggctcctaaagtccctctggaagagccccgacccagcactgcaccgggcggctcccctgaggctcctgtgcagcctgcttcgcctccttcccggaagagacatttggctcatctccgacaagaccttccggggggatgataacggggaggccctgttcctgtggctgtgcacacaaagacctaaaggcatccggccggtcttcgtactggaaaaagactccccggatttccggcggctgtcccgggcaggggaggtggtgccctatctctcccggaaacacctgcgtcttcttctcctatgcgcctgcaatatcggcgcctatatgcccagggctctgcggcagccggatctgctcccgcggcaggctttcagtgactaccttgcccggccaaaacaagtatttcttcagcacggggtcacccataatgatgtttcccggagcattggaaagtatgtgaagggcttccatctggtcacctgcgcctcccacagggaacagaaggccttccttgagggggcctaccactattcccaggcgcagctcccggtgaccgggatggccagatatgaccgtctctacctggatacccggaagatcatcaccttcgcccccacctggcgggacggactggtgggggacccggacaggaacgatatccgccccctgaccccggagttcagaagcagcgccttcaaacggaacgtgtctggctttttgaacagccccaggctcctggaggcggccgatcggctgggctatgccatccagttcgttcctcataccgttttcctcccccacctggaggaattccgcctggacagccggatactggtgcccggtcgggaagtgtgctaccgggaggtgtttgcccagagcagcctgctggtaacggactactcttccgtagccttcgactttgcctatctgaataagccggtggtgtatttccagttcgaccgggaggaattcttcgggagcggccactacgggaaaggatattttgactataaaaaagacgggttcggggaggtggaggaagatctggaggaggcggtatccctggtgatcgcttatatggaaagcggctgccggatgaagaatgcctaccgggaacggtgcaggggcttctttgcctaccaggaccaggagaactgcaggcggatctatgaggagatccggaggctgtgctgtacttaataacagttatctggtttgcactgcttggtccaggtccagtttctcctgaaatggaaaacagcccctgccgcctggttctggcggacaggagctgtccctgtttttcttatagttttttcaccttgcatactttctgacagaagcagatcccataagagaccacctgatagccttcctgcaccagttccctctggtaatccctttttcgtatctgttccagcgcctcttcacaggcggcttccatctgggagaaggtcctcacacttttcagctccatcaccaccgccggatgctggggcctcctcggcttcagcagcaggtccggcctccctgaccccgactcccggttcgacagcacccggtagtcatccaggttctttaggacacctgccaggaatccatggtagaagtcctcccggtaatcataataactgatgctctccataagctggtctgtcagctccctctccagggcagtacagtcccctgtctccagggccttcccaaggacagacaggtcggtctgtctcatccggtcatcgaaccattccagggtaaacctctggtagatgtagcggatctcccggttggggaacgacagcacaccataacagatatccccgtcccagtactgcctttcaatcttcagatatccggtaaacaacaggaagttccataggttatcgctggaggatgtcatatcttcataggtgatatcctccttcagaggcttttctatagatttccctgccatgagctcctcgatatcgtccctatcccggatatctgcatgttcgatcatcctcttcacaatattgttggagctcacattggaccagaagggacgagggtgggcctgcgggtttgtcagcaggctgtctgtaaagttcaccacgctccagggattgtagacctccttaccgccaaaaagatagccgtcataccattcctgcatgaccgggaaggcttcctgccgcccgtagtagtccagcatgtcctgtacctcctcctggaggaagccgaaatattccccgtagctttcgttcaggatggagatcatgttcaggttatttaatcccgtgaaaatactctccttggtaatgcgcagacagccggtgatcacggcgaattccaggttctcgttggtcttcagggcggattcaaacagggagcggataaaaccgatcatctggtcataaaaaccgcagaaatatgcgttttcaaggggtacatcgtattcatcgattaaaatgacagcaggttttccatagtgatgcataagctgtttggaaagaaaggccaacgcagtaacataattttgttccagcccttttcgctggaccatatcacaatattttattctgtcagcttctatggaaatggatggaataacatccatatgccgctggaattcattttcaattgattccttaaggcaggaatacgccaattcccaagtaggctgtttggaagacttcaatgacaatgtaatgacaggatacctgttcatctgtgaaatatactcatatccggtttccataatcttcatattttgaaacaatgttcggttttttgtatttatttcttcagatcctgtatcctcaaaaaagtattgaagcatgctcatattaagagtctttccaaaacggcggggacgggtaaataaatttacttttgcctttttatccagcagttctttaataagcaaggttttatcaacatagtaaaaattacgggtaataatttgtttaaaatcatcaaatccaataggtaacggtctcaaatccattagctgatccctcctcatggatttattataccagaaagagatataccctgctaggtagttttctgtaaagagcaaattcctaaaaagtaatgtacatagaaaacgtagaaatctgcggttatttggaacattatttatatcaatgtatatttttataagcattattaggtgtatgtataaaatgtaacgatttattaggtcctaccttttgtaccgctttataaagtgaacggatagcccccctcatgagcaatgatggcaggcatgcgtagagagaccgttttatgtttggggtccaaaaacggttttaagaattgaaaactgtattaaagcaccggataagttcatgggtacctatccagcaggcttgaattccttgtaaggcatatctacagaggattctgcatcgccaaaaatattctgattcatgtgacaatgaaatttacagttggctgaaaggagtctgtttaaaagaaaccttaccccaaatagctattatgtattctccttacttatgaaaaaatgcccctagttatttacaatgtgtataacttaaaatagacaattaaggtatggaaactataagaatttatagacttcataataatactgatattttttgatgtcctgtattattagaccgtatggattttttgctagataattgtagaattgatgtaaagaaaaactcatcttcaggtatctgtttaaaaacttttttacattcttggacataatcggactttcttttttgaaatacaagtaaattcgacgtaattctttgcgattttaaaataattgtagaaatattaatcattttcagtcttttcatatgcgcttttgtctgctataataaccttactagttaaaggtactaggtaccattactacaccaatagaacaattctaatatttcttttagtagaggcattacgattaaaaatatttttaatcgtacgaggcaaacaatttagtggcgaaaaatgtctacccttttcatcttttttagttctaattattatgtcactactaaaagactcctctaaaaatctataaaattctgatacttgtagacattttcgccttgccttttgtataatttatattttgcctaattttgtcttcaatttgacatctttcatttaaaactactcttttcagagatatatgttgtattacctgctgtttgaaaatatcagcaggtttattttttaactaagggcttgtttcccaaagttctatttgtcgggtcataaaaaaacttcacaatggaaaacagacacttagtcttacaagtaaagatccccggcacaaatgccggggacctttcgcaggaatctttataattacccaaacggattatttgataacaaccttggttgctgtgctctgctgggaccagcggccgaagtatttcagttcgtcgctgctcatgatatacggatgtacaccgatgtagtgggttccttttgccacgttggtaaaggtaacgctttgtttctttccgtatgcagcactcaggttcttcttcaggtacttgttaaagctagaagttacaggacgctggggttctccgttgctggaacgcagggtctgtccaagcattacgtccacaccctgggtacgtgcacctggtgtaaaggtgacggtcaccttgtttccgcttacgcttactttattgatcacggcagcgttaggggtttccgtagtaatgcttacatctgcggcttctgaccagtcggaataggactttttgccgtcttcatcgcgcacgattgctcttgcgtataccttgtattcacctgctcttacaaataagaaggaagatgcggtgccttccacgtttctgttggatttgaagaaatctaaagcagccagatcttcttcacttctgcacagaacatagtcatatgcagttgctccctctacggcctcatctacggttacatcgatttcattacggttaagggcagcggagataacaggagcggattcggaaagatcttttacgatattgaatttctttgtctgctctccggtgtaattcttgttggaagaaagtgccttgatagtcacggttccttcgcctgcttccacattgtcaccgtatactacctcatagtccgtgccttccactaaacggatgttgccgttcataacggtaactgcaggttttacctgctcgccggtggctttctggtcttcaatgtcattgatggccacatctgccagatccattgcggtcacggtataggtaaccttgttgacagatttggtagtgtctacgtttacagggccttttttggtgtctgtattgtagttaatggtgatggtaccggcttttccaacttctttagctgcagcatactctaaggtataatccacgccctcttttaaggtgttggaggttccaggaacggaaataacaacggatggtttaacttcctgtccggcagcgtatcctgcatcacctacagaaatgttctgttttgtaattgttgtcttcttgatagtgaagttctgggtaattgtgccataatagctgttaataccctgaataatcatttttgctgtaccggcattggtgttattttcgtatttcacagagtaatcggtgccttcttttagtttcgcaagagcgcctcctaatttgtaatctacgtctttttcaagagtaacttcgtttccggtatagacatgactatttgcaacatttgctaccatagttattgtgtctaatgggagcccgttagctgcaattttaaagttactggtcaaggtaccttcgtagccattttttccggtgattgtaattgttgcggttccaacagctttgttgttgctgtaagctatatcgtaatatttctctggtacaacaactccgtttttgtcaagaactaagaactgctttttgtctaaagtaatcccttctttagattctgcagcttcttttgtatagcctacgcttggaagatcagccttctggtcaatagagtttacaatcttaccaccttcaagagttgcgcctacgatgctaaatttgactgttttttctccggtataacccgtattcttttttgctacaatagtaacagaggcagtgttttctcccagattagtgttattattgtatttcagatcaaaattttcttctaatatacgagaattctttttctcggcagttgatagtttatcaaaatcagccttttttacataagtaatacccttgtatgtaagggttacatctggcttcacagctgtaccggtaaatggctgagctggaatttcagatacaatcacatctgaatccttgatatctttatcagtcagcgtatacgttctagtaaccgcagcacttccaatattggtgtttttacttccagcaaatattatactagaccctgtatctgcatctgttctaacatctaaaacggttttggttttatcatcgacattagatttatcacggtcgataacataatccttgccttcttctaaaacatatccagtagacttaattaccatcttgagttcaggtataggatattctcttgcatcagaggaagcatcttttccatctttatcaactacgcttgggttataataaatttttccatctgacgctggtgttatagtgataagtcctttattaataccctcataaatccagatttgccttatgctgaactcgtctgtggtatatacacccttgtaagaaccaatacctgtaaatttaatggacatcttgcctgcatcagttccgccagctacaatttctgtggtaaaatcacggccaataatcagtccgccaaattcagctcctgcttgaataggattctgctgagctccagtaaaggaatggctttcgctccatgtcacggcatattttttaatatcatctttaaaggccgataaagaattaatgtctattttatcgtttgaatatgtagtctgtgttgttcccttgtagttgtcatcaccatcaatatccgcattaattttaacaatggcatctacatttggttcaccatcatgaattagttcatattcataaacagcgcctgtaacagtatctcccttcttctgtccgagaagggcagtatctggatttacagaatcatcaaaaatttctatttttgtcggttctgttgcagttttcggagtaactacaattctacaatccttaatatctttggcagttatttttgcttcccaagcagagcttgcagaaaatccggcatatgcatttttacctacaatttcaacggtatagcttcctacatttacgtcatctaaaggaagaacttcatagtcagttccttcggttaaagtagctccgcttatagaatttttaacaacaaatcctgttggagtgattgccttaccggtatatacatactcctgtttattgcttgcttctaaattggaaatctcaagggttgtggtatctgttgcacctatattaaatgtacctgttgcattaccgctataacctaaattcttttctaataaggcaattgtaacggaacctgttccaacatttacgttatcaccataacctacaatctcataattggcactagacaccgttgtatcaaaagttttatcaccatttgtatctaactctaccactaagttacttttttctggacgatgaactgttgctggcgcaaattcataaacgccattaacagtaaccttaatttgagactgacttaatactattggctgtactttgataacatctgatacaatagaagactcagtattccctaatgttccggtatatgctattacgcgaagctgctctcctaccaaaccagtccaattaatagtatagtttgcaagatttccacctgtcgttacattttcccaattggagtcaccaatttttttctgccactgatattttaaggtggtttctgctggtgtaataccagaataatctggtttaatctcagcgccaaactgagcagtcgcaggtgtttttatgcttccttgaattgctgtatcacccgccaaggtttcagttccttcatctaaaattgctggagcaacctcatctacaaccggtgcatcagcctcaaaagcctgtgcttccacagccacatcagctggatcctccgattcaaaggcagcccaaaccggcacattggaagtggccagcattgctgctaccagcgaaatgctcaacgcttttttcgccatgcccttctttgtgtttttcattttcgtcatgttatagttcccctttccttaatataactatttctttttgggtaaagattcctagacataatctgtccgttatgaataatatagtgctttaccctaagtttgtcaagcgaattgcttcaaaaattttaaattttcttaaattttgccttcccgaaaactattgatttttcgggcatttcagtccaattttccacatattggacacctttcaattcacaatcctgcaatatatacaagatatagtgtaatgaaatactaacaacatattgtacaaaatgaaatacaatctatttcgggggattttttcttcccccggaataagattttttatctgtacttactatctctgtataaattctcaccaagtgagttccgcttcactgttacaaagtcactttttcctggaattcctgctgcttatttatctttgatagttaccttatctaaatgccagatttcatccacatactgctgaatggttctgtctgaggtaaactttccggagcaggcagtgttcagcagagccattctggcccagccggactcatccttgtaagcagattccacacgcttctgggcctctgcataagaacggaagtctgctaaagtaaaatactgatccggacgactgctgctcttggtattcaacaaagaatcatataagtcgcggaaaagttctgtatcatcagagaaggttccattaacaagctggatgagcacgttgcggatttcataatctgtattgtagattacatttggatcatatccaccgttgttttcataattgataacttcttctgaggataatccgaagatgaaagcattgtctgatcctacttcttctaccatctcaacatttgcaccatccatggttcccaaggtaaccgcaccgttaagcataaacttcatgttaccggtaccagaagcctctttacttgctgtggaaatctgttcagatacatctgctgccgcgaaaatcatttctgcattggatactctgtagttttcaataaataccaccttcagctttccattgatggaagcatcgttattaaccacatctgccacagaggtgatcagcttgatgatcagttttgctctgtgatagcctgcagaagcctttgctccgaaaataaaggtccttggatagaaatccatttcaggatgctgtttaatctgattgtacagatagatcacatgcagaatattcaaaagctgacgtttgtactcatggagtctcttaacctgtacatcaaaaatagaacgtggatttatctcaactccgttatgctccagaatgtatttcgccagacggaccttattttggtacttaatgttcatgaactcctgctgtgcttttgcatcgtccgcataaatggccagtttcttaatctggcttaaatcagtgatccagtcatctccaatatgctcggttacccattttgccagcagaggatttccatgaagaaggaaacgtctctgagtgataccatttgttttattattgaatttctgaggcatcatctcatagaaatccttcaattcctgattcttcaggatttcggtatgaagtctggcaacaccgtttacagaatatccggccacaatggcaagatgtgccatcttcacctggccatcataaataatagccatttttttgatcttctcataatttcccggatatttctgctgaatctccaggataaatctcctgttgatctcctcaatgatctgataaattctgggaagcaatctggaaaacagctcgatgggccatttctccaaagcttcgctcataattgtatggttggtatacgcgcagcactttgtggtgatctcccaagccttatcccatccgagctcttcctcatccacaaggatacgcataagctctgccacggcaacggtaggatgcgtgtcgttcatctggaaaacaactttttcatacagttttgtgatatcgctgtgtttctttttgtatttctcaatggctgcctgaagggaagcggaaacgaagaaatactgctgtttcaggcgaagctccttgcctgcgtagtggttgtcgtttggatacagaacctctacaatatttttggccaggttttcctgttcaaccgctttcttgtaatctcccttatcaaaggaatccagctggaaatccacaataggctctgcatcccagattctaagggtgttaacaattttgttcttatatcccacaataggcatatcgaagggtactgcttttacagcctgatatcctctgtgaacaaatttgttttctcctttttcatagtcataaactacatccacataaccgccaaaatgtacttcctttgcatattccgggcggcgaagctcaaagggataaccatccttcagccagttatctggaacctccacctggaagccgttctcaattttttgtttgaacattccataacggtaacggattccacagccatatgcacaataacccagagttgccagagaatccagaaagcaggcagccagacggccaagaccgccgtttccaagtgccggatccggttcctggtcttccaatacatttaaatcaaatcccagttcttcaagagcctctcctacctcaccgtatgctcccaggttaatcaagttatttcccagagcacggcccataaggaattccattgacatatagtaaacgaccttcggatcctgctcgtcataagcattctgggtttccagccagttatcaatgatcacgtccttcacagtatagcagactgcctgaaatacctgctgctgagttgcctcctccagtttcttgcgataaagaaattttacattgtctctgacacttttcttaaatgcctctttcttgaactgcgcatcaatcatactttaacctcctattttttagatactcccagggttaccttttccttattaatattccattccttcacgtaaccctcagtctggcccagaatcatctcttctgccaaaatctctgacataatgtctttttcatgagccttcatgatatccagtattttctgattatcttttgcgtaaatacaaatcttatccatgacttcaaatccagcctcttttctcatggtctggaccttgctgatgatttcccttacaaagccctcctcaataagctcaggcgtaagatttgtatccaatactacagagatttctccttcgctctctgtgacatagccttccatctgtgcagtctcaatcaataagtcttcctgggtaaggtctacctgatttccgtctatatcaaggttcagcactcctgtttccttcagctgggccatggctttgctgccattcacttcactgagtgccttacggataccattgagaagttttccgtacttcggaccaacggtacgaagctgcggtttaaaactatacgaaataaaactctctacatcttcagcaaattttacattttttacattcagctcatcagcaataatatctgtaaagaatttttccatggaaaatggtgctttcacatacattgtgccaatgggctgacgatttttgatatttgcagtattgcgggcagcacgtcccagaaccacaatatcaagaagctgttccatgttgtcttccagctctttatcaatccactgtgtctgaatctccgggaaatcacacaggtgaatgctctccggtgcttccttatttacactcctcaccagattctggtaaatatcctctgtcataaacggaaccataggtgctgcagcttttgcaatggttacaagagctgtgtacaaggtcatgtaagcattgatcttatcctgctccatccccttcgcccagaaacgttcacggcttcttctcacataccagttgctcaactcatccacaaaatcctgaagggccctggctgtctcaggaatccggtagttttccaaattttcatccaccgcctgaacaacactgtttaatttagacagaagccatttatccatgactggcagcttctcataatccagtgtgtacttggtgggatcaaaattatcaatattagcgtaaagcacaaagaatgcataagtattccacagagtactcatgaattttctctgtccttccacaaccgccttcccgtggaaacgattgggaagccatggagcagagtttacataaaagtaccagcggatggcatctgccccgtaagtgtcaagggcttcgaaaggatccacggcgtttcctttggatttactcatcttctggccgttttcatcctgcacatggccaagaacgattacattcttataaggtgccttattaaagatcaatgtagaaattgccagcagagaataaaaccagcctctggtctggtccacagcttcagagataaaatcagccgggaactgcttctcaaaaagctctttgttctcaaatggataatgatactgtgcaaaaggcattgcccctgagtcaaaccagcagtcgatcacctctggtaccctgtgcatctcttttccgcacttgggacatttaatggtcaccccatcaatatatggtctgtggagttcaatatcatcgggacagttatcggacatggagcggagctcctctttacttccgatagaatgcatatgcccgcactggcactcccaaatatttaacggtgttccccagtaacggttacggctgatcccccagtcctggacattctccagccagtcgccaaaacggcccatgccaatactctccggtatccagttgatggtattgttgtttcggatcaagtcttccttgaccgcagtcattttaatgaaccaggactcccgtgcataataaatcagaggagtatcacatctccagcaatgaggatagctgtgttcaaacttaggcgcatcatagagaagtcccctgctctccagatcctttaaaatagacatatcagctttcttgcagaagatccccggccagtctgtctcctctgtcatctcgcctttttcgtcaacaagctgtacaaaaggcagatcataacggcgtcccacctgggcatcatcttcaccaaatgcaggtgcaatatgaacaacaccggttccatcggtcaaggtaacataatctgcacaggttacatagtaggattttttcgcaggattcacaaatttgaataatggttcgtattccttatactccaggtctttaccagtataagtttccaggatttctacatcctcacccagaaccttttccacaagagcctgagccatataataaatcttatcttctttattgtttcttactttaacataggtttctgccgggttcacacaaagagccacattggacggaagcgtccagggtgtagtggtccatgccaggaaataagcgtcttcacccacaaccttaaagcggacaactgcagaacgttctttcacatccttatatccctgtgctacctcatggctggacagcggggttccgcaccgtgggcagtatggtacgattttgtatcccttgtataaaagacctttttcccagatctgcttcaatgcccaccattcagactctataaactggtcatgataggtcacatagggatgttccatatccgcccagaagccaaccgtaccagagaaatcctcccacatgcctttatacttccagacactttctttacagtgattaataaacggttctagaccatactcttcaatctgctccttgccgtccaaaccaagcattttctctacttccagttctaccgggagaccatgagtatcccagccggccttgcggggaaccatataacccttcatggtacggtatcttgggatcatatccttgatgacacgagttaatacatgtccgatatgtggttttccattagccgttggcggaccgtcataaaaggtatatgtggggccttctttgcggttttccatacttttttcaaagatatggttttctttccagaactcttcgacttttttctcacggtctacaaagtttaagttcgtgtctactttctggtacacgtgtatccctcctgttaattattttgttgaatataaatataataaaaaaagtaccttcttcctgtaaaaggacgaaagtactgcttttcgctataccacctgttacaatgtacgggctgaggcctatacttgttcctggtaacgggggaagaaccgtctttccttacccgtgccccataaccttcccatgggacgcgctcagaatcgaaactccagagtgattttccgctgcttctacttgcgccgggcttccaccgtccccggttcgctgatgctttggaaagcagcttactgtctccatcacggtttttacgctatatacgtatgctgatatattatacttgctttaatttccaaatgtcaagcactttttttcacatgtgccgcaataccatgccgtcagcaccctgcacagtcaattttacgaaacttttatttcttttctccagtaaaggtgctataatcttacgaagtaatgaaaaacatacttttttacgtataaaggattgatgcttatgaaaaaatataaacttccacttggaaaaatttttctgagttttctgctcaccgccggtcttactgtaaacctggcaggcaccaccctggcttctcaggaagcagctcagacaacggaaggcacccaggagcaaactcaggaaagcgttccggacgaagcttccgtagaagaaccccagcacaccttatattatgaccagatcccggagagcaatcaatgggaaaattggccccagggtcctctcatagaagcccaggcaggcattctcatggattataatacaggagctgtcatttattcaaagaacgcagatgaacgtctgtatccagccagtatcaccaaaatcatgactgctcttctggcctgtgaaaacacccgcatggatgacaccgtggttacctctgaaaatgctgtatacggaatttcagaggacagctccaaagcctatctggaggttggagaggaaatgaccatgacccagatgctcatgtgtgttatgcttcagtcagccaacgatgctgcctatgcagtagcagaacacaccagcggctccatgaaaaaatttgtagagttaatgaatcgccgtgcaaagcagatcggctgcaccaatacacatttcaacaatcctcacggactacacagcgacaatcattataccacagccagagacatggctctgatcatgaaaaccgcctggagaaatgcccgtttccgcagttttgccagcagagtcacctatgatatccctcctactaataagaataaggaaaccagatactacttgaacaaccataaaatgatgaaaactgaggtttacgaatacgaaggtgtcatgggcggaaaaaccggtttcacagatctggccggaaacaccctggtaactgttgcaaaacaagggcgggtgactttggtatcggttatcttaaacggagtcaacggagcgtatggagatactgccacactactggattatggttttgggaattttaatgattacggagtcaataccacagtagtcaatgctgtaacccgcacgctcccctgtgacgaaaaccttttgccagatgaaaaatggccgtctattctggaacccgccgcatcctattatgttacactcccaaatggtgtaaaaatagcggatctgagaagggaaaatacacttcttcccaactcaccgggaatcaaccggatcaaaaccagtttttactacggagaacagcttaccggaacctgtttttcctatgaaaaagaggtccttaaagacctctttgactaacctttttcctgtttttttcttaactttcttttggtgcgaagagattcctgtttatcctggatttccttcgcatcttttatttcagcgatttttacagtttttacagcataataccgctcctcatctgtacgcttcattcttatctttccctttaccataccgtgctgggcacaattggataagctataatactgcttagaatttgtagtgaaccaccggatttttctcttagcaggctgaccacacacaggacatctggtactggtcacttccctgtccttcatagccttctctttagtatcaaactcctttgaaatatatttatcataggtggggtaagaaatatggcattcttcttttctctttttcggattctgataaacatcaatggagctgtagagaaaaaccaaatctttattgatacttttaaggataagacctgtgtagtaggcatcggttaaggctctgtgaaagctgagattcttctctatcttcagatagtcaatggcatactccagggagcgtctgctttttccgtcttcatagcagatgctgaacattttctgaatgtcataataagtgataggtcccggaagaagatttaaaaggccataatacttcaagtttctctgcagctccatcaaatccatgcttccccaagtacaaaacgtacagttttccccgcaccattctaaaaatcttttaaccacctgaggaaatttttccccttctaatagagttttgtaatcaatatgcacgacctctcttgttttggcgtgaatccacttatacacactggggttcaccacctcatgaaagctgtccacaatttccttgtttttatccaatttcacagctccgatttcaataatctcaaatggaagccggtgatcctcccgcctttttccttcaggacattgattccactccagatcaaataccacgtaattcatgtaagctcatcctttataagttcatagtgggataaaatttcgattactccagctgctctcccagttcaaaaattgcctcaataagaaattcctgaaagcgcttcgtatccgcatgctgtaaaactgtaatatgggaatcctcctctgagtagctccaccatctgccgtcacagatggtcctgcctcttgatagagagtcggaacagtccacatccacaggcatagcttctcctttaaaatattcaggatgaagcagataaactaatgtgaccacatcgtgaatatttaccctggatgtgatttttccttttttagtatccagggaataaccaagaagatcgccgcaaacagaagccaccctatttccactttgacataactttgcaatctgactcctgtccaaataacactgcgaggtaacatccagcccgcacatcactatgggaattccacaatcaaagacaattttggcagcctcaggatccacataaatattaaattctgctgatggagtcgtatttcctccggttatggccccgcccataagtacaatctcttttattttttcttttatctctggaaaagtctttatcaacagtccaatattagtaaggggtcctgtaggtaccaaggtaaccttatccccttgcggaaaccggttcagaagctcgtacatataatatactgcattttctgaaaccgggattttgtctgtttccggaaactttgcataacccaggccgctttctccgtgaaaagctcctgcagtgaccaattgcctgcatatgggccctcttgccccctttgcgacaggaacatccagccccagataatccgtaagcctcaacgcattctctgtgacaatatcaatccccagattccctgcaactgttgtcactgccagaagttcaagctcctctttttttgcagcggcagtaaccaaggcaatggcatcatcaataccagggtcacaatctattattatctttgttttttccataaaaaacacctcccaattcttttatttactttcaagtataccaaaggaattccatcctttcaatccatgagtgttctttgtagattttaatgcactgtgtgaaggaaatttcctgtatctatttcattcttcagtgacaagatatccatgatttgttaaagcatcaagagccttttggaaattccctttcttaataaaaatataatccgtattataggtggaaacggcaaaaattccaatcttattttctgccaatatggaagagattttcgacaaaataccaattaaagaaaagtccaatacccccttgatccgaaaagccttccaacccttatcacaatccagcgtattcaccggaacatcttcttctctgcaaaccagagaaaactcttcatccgtcctggctgtaaaacaaaactgctcttgcatattgacttgacttccatcctgaagcctgcatacagaaaatgttccatcaatgacttctatttccattttctcctcccaacttctatatcatcctatttatttagtttaactcataccccatgggaagtccacagaagaataaattcgtcaggctcttctcttttagttccccctttattcataagacttgacagctttgctcatcaatgtacagctgcaaagcagcttttcttgccacattgtgcgcatcccccggagggtttttatcacataagaaagttcggaaaacttttctatgtaataaaaaatgccgaaaatcttgcgatctaagattttcggcaatcgtttcagcgttcccgaggtgattcgaacacccgacctaccgcttaggaggcggtcgctctatccagctgagctacggaaacatataaaaggttcttcacagaacagaatttattatagcataaactttctgatctgaaaagaggaattctttatttcactctcacttttagctatttttttactcaccccttcttgtagaatacactgaatttctctttaaaaacaaataaatgcgcttccatgaaaagggggatcatgtacgcgcatttatttgttttgtcccagactaaaagtgaagctgtccctgcagccagatagttcctttgaaccttcttccgacctcaggttctccaagaagatcttttttattgatcagcacatcgaactgcatatcattgctttcgatggtcatctgacagatattttcccctgtcagaatgttcttgaaggtcatgtaatccaggatctcacccaaaatactatattggtcacactctatgccgtaaggcataaagtaggaatccacaattgtaaaaatatcctcagtctcaatacgctgggagatcatggtatacatatccatatcttccattgtaagactttccattgcctcctcatcgccatctctggcggcctcaatgagatgatttctggtcttggctgtctccttttcaatctttactaattccttgtctttttgaaccggaagcagtatttttccctctcctgcaagcccggacaatgtcagcggctggttaaccgttaaattgccctttctggactctaaaaggtattccgcaggattttgcagatagaaaatcaatgttaccccaatacgcagatcatcgcaggcacctgcaaaggattctttttctgcatgtttctcaacgacgacacgctcctgtgtggtaattcctgtgcctctgaaaaacggataataatattccatacggaactggccattttcttcatactcaccgcatacggttattccgcaatcacaaccgaaattcttggaaaattcagcaaaaactccattttcatggttttctaccacattcttttcatcataactgtctatgacctcctgaagaatttcatccaagtccttcttttttatcttagaaaagccaatggttttcaaataactatgcacaagaacacctcctctcattcttcagtcaactgccgctgtgcacatgctttttttgtgctgcggcatcttttatttattctttggtacaagttttgtggtaccgcccatgtaaggacggagtgcttcaggaatgttgacgcttccgtctgcctgaagattattctccaaaaatgcaatcagcatacgcggaggagctacaacggtattatttaaagtgtgagccaggtattttctgccattttctccgtttatgcggattttcaggcggcgagcctgggcatcccctaaattggagcagcttcctacctcaaaatattttttctgacgaggagaccaggcctccacatccactgatttaacttttaaatctgccaagtctccggagcagcattccaaagttctcaccggaatgtccatggagcggaataaatccactgtattctgccaaagcttgtcaaaccacattggactttcctcaggcttacaaactacgatcatttcctgtttttcaaactgatgaatacgataaacgcctctttcctccaggccatgagcgcccttttcttttcggaagcagggagaatagctggtaagagttttcggtagttcttcctcaggtatgatctggtcaataaattttccaatcatagaatgctcactggttccgatcaaatataaatcttcaccctcgattttatacatcatggcatccatctctgcaaaactcataactcctgtaaccacattgctgcggatcataaaaggaggcacacagtacgtaaatccacgattaatcataaaatctcttgcataggagatcacagcagagtgaagccgtgcaatatctcccataagatagtaaaatccatttcctgccactcttctggcgctgtccaggtcaatcccgtcaaacctctccataatttcagtatgataaggaacttcgaaatctggcacaacaggctctccaaatttctgaacctctacattctcactgtcatcttttccaataggaaccgaaggatcaatgatattgggtatcaccatcattgttttgagaagctcatcttccacttctttctctcttgctgtcagttcttcaatccggcttcctgaagcagcgacctgttttttcacctcttctgcctcatcacgctttccctgcgccataagagcccctatctgcttggatgtcttatttctctgagctctcagagcttcaacctcctgcttaatatcacggttttctttatccagctccaggactttgtcaaccagctccagcttgctgtcctggaatttgttacggatattttgttttacaatttccggattttcccttacaaacttgatgtctaacatttctttcctcctgtatgttcctgctttttgtatttcttatgatttttcttctctttcttcctgcaggccgaagttcacagctcttctcaaggcctccacctcttcctgactcagcattacataagattcaccttttacgatttcttttaaataaagaaaacaattatcccggctatggatggcgttcaggatcaagccagtattttccctgtctaataaggcaagtgcaaagcttaattttccgcctacgtcatcaaaagcatcatacttttccacaccatatttactgaataacctctggtaattcttttttaggaagtggatatctttatcgtgaatatccttgatttcaaaaagcttgtcaatctggttaaactctctggcaaaaactttttccagcgattgtccgtctgcccccttcataaacatcttatatttgcgttccaggcggcttagacgcatattactgctgacaacactcattagaagtataaccactaataccatcaatataatcacaataacgccgggatcaatgccgatactctcaaaaagtccactcatttctgtctcgctcccttatcctattgataccagcaaatcgatgatacgctccaattcatccttagaataatattctatttcaattttgcctttctggttcttctttctgaggattgaaacttttgttcctaaaatccccttcattttttcctcaaggctttcaaaaaccgcatcttctgaagggttactgactttttctttcttttttgcaggctccagaagaagctttaccaacttttctgtctctcttacgctgagtttttcgtcaaaaattcgatttgccacggtcaactgcagctcctcgtcattaattcccaaaagcgccctggcatgtccggaagatatcatttcatcaataagcatctgctgaacctgtgcacttaatttcaaaagccgcatagaatttgttacagccgtccggctctttgccactcgttctgctatttcatcctgtttcagatgaaattcctccataagtcgtttataggccaatgcctcttcaataggatttaagtcttctctttgtatattctcaatgagagaaatctctaaaacttcctgcgtactaaattctcggataatcaccggaatctcttttaatccggccattttcgctgctctccagcgtctttctccagcaataatttcgtaatagtcctttttatcagacactaataaaggctgtaatactccgtactgtttaatggactcagacaattccaataaggaatcttcatcaaattgtttcctaggctgtcctctgttaggctccacttttgagagttttacaaagacttgtccatccttaaaatttgtttcttttgctaaggtctttccattattttgatcaagaccggacagattttttccagattcgtttctgagagttgtcttagttgctttatcacttccctgtgataaattatcaggaatcaatgcatccaatcccctacccaatcctgtctttttcaatgccatcattcttcctccctgttaatcacttcttctgccaaaagacgatagctttctgcaccggcagatcttgaatcatagagattaattggaagtccgtagctaggggcttctgcaagacgtacatttctcggaattattgttttataaatgttctggttcaaattctctttaacattttccacaacttccaaagacagatttgtacgggcatcatacattgtaaatacaacaccctctatttccagagtttcattcaatcgattctggactaactctattgtatgaattagttgagataacccttccaaagcataatattcacactgaatcggcacaagcacggaagtggctgccgtcaatgcattaatggtcaacatacttaatgaaggaggacagtccattataataaaatcataattatcccttacctgatcaattgcgctttttaatatgtattctttgtcttcaataccgatcagttctatctccgcccccgataaattcatatttgagggcacaaggtctacattttctaccacattttcaacaatgcagttttcaattgtacaattacctaacaacaactcatacaaagtattttctacattatttttatctactcccaatccactggtcgtatttccctggggatcgatatccactgtcaaaacccttttattttgctcagccaaacatgctgaaagattaattgcggttgtcgatttaccaacaccgcctttttggtttgctacggctataattcttcccatttttacctccttatccacgaggatagttttattatatcacttttcttatagaatggctatcattgtttcacgtgaaacattaaaatttactattacttttttgtgaattattgttaaaaatatatatgaagtaccaaatattttcatgttcttgctgtttttcaatgtatttggggaagatctaacagatggtatttgcaatgttgagattgtactaacttgatttatagattttgtattttagtataaatatcataggtactaagtatttgttactgcaatctaactactttttcgtatctgaaataaaacacctattacttgtgtgataataaatattgaagcaattttaaatatatcagcttttattaagccggtcatagaaaacattttacgattaattttgaatacttaataccataggatgatatattgcgaagcacgataacacaccgtaaggcgcaagtatttttacattttttatattatatatcaagcacaaaatgagtctaaggatttcggtacttcggaaaactgatccatgttttttcagaattacagtttatcgaaaaaaagtatttcaaaaatatcattttattgcatactactacacttccactacttattaatgatgatttcggctcttgctaatcatgtagaacttctttcaaaatttattactattaatcattgttcattttgttcccaacgattatgttaggtcaaaattcattctttacaatatagtaataattctttcgatgcaacaagagtcaaagtaattttctgcataatatgactgcatttaaaagcaaatatttcgcagcattattttattattcttctctaacaaacaaataatgttggtataataaatcaatacacacttatacaaaaacatttaacgttcttgataaaatccgttaatttatatcatccacaaaaacttacgaaatggcttcttgtttctttatatttatgctaaataaacatacatcaagacgtatcctttaacatagtagatatttatctacaacaccgaatcaacacaattacaaaaaattttcttatatcagtacaagtttaggttttgatcggtaacagaattagatagagtgttatgagtaagtgtctatgtgcaattcaaatatgtcttttgctaatatggaaaatagtaatcatatttaaatagctgttgaagttttcaagacacatttataagaaaccttataagaggatatctagaagaaaatatattgagggtcggatcagtttacaggggatgttataaaaaccaacaagatgaaattctagtttgaagtgctggttaacaagcgaattcaaaaaggttggtttaacggactaatttatggcactgatttataagaccgatttacgaaactaaatttaaatgctaattaactataagattaatttatggcactaatttacaaaaccaactaaaagccaacttataagactaatctatgaggctgatttatgaaacaaatttaaaagactcctcattaagtttataatcattacaaaaaatacagtgctaggacatatagtgttaaacagcttgctaagtgtatattttaacagagcattacaaattataatttttaagcaactaaaaatacacaaccattaaaattagtgtattctaatttaattactagcactatataactattgcttattgacgtatatggctgatatcaacaaaaatttataatttcatttatttggatgagttgttcatatattttatacatacaattaaaagcgtaagtcagtttgtatgtatcatgtattttcaactcaagcaaattatagaaggaatgtttcacgtgaaacatcccttctataatttggatcaaacgaaaaatacaaaatgatatggctaaaacatttttataccatttcaaaaacctaaatacattttgacatgaagacttattatcatcagtaaaataaccttcatattttcttatttcataagataaatgtttcacgtgaaacatttataaaggcagatttacagtattgagtgatccaggttggaggacggagaacacacgagatctatgtggccaaccaggagatgatggagagcagcgtatctgtccagacggaggtttttgcaaaagatacactgattcatctttccattgacggtcagaactattttctgcgcacccctccggaagatttttctcagcttaccgtccaggggcaaagtcccaccggcggatttactacaactacaccgctccggacaactatatggtggaatttaatgcccagggctaggcgattttttatagaaacgcggatacaaagaacgcgggtcccttccgccacaataatataggcggccagatcatctattcgcatctgaaagcagtgaggagtaccaggcatacgcccctggcaaaggtgggctatcgccagacaagttccgcgcattaatttaattcttcaactcgacaattgcaaaagcaattatctatgcaattaactatttcagtatacgttatctcaatcattattttttattgtgaaagcagtattatacatgacaatcctagtggtatatcaatgatacattggctatacaacagggcacctgccagcaacagaattacaaaaataatgcaattttccttaattcattttatccaggttaagatttacaggatttgtaaggacttctttctgtttaattttcaaaagtagtgtctgcgttttttcaaacattcctcttaatctaatttcatatcaatgaaatttaatgcaaaagtcttttatcataagacaatatactaacagctaaatataagcaaaaaataaattcaattcatatagctatatagactcaaatattttttatcttactggctagatcgaacgtctttcacatatccattttaatttgctagtcctttacacttttgcgggatatgtacggcataaataatatctaagacaaagaatttaatcagtcaattagtcaataacttttttattgcattatttaacaagccgttatatgtactgtttaacgtactttttcagtaactacttcagcttaataaaaagtcttatatatttctaagttatggttagtcctaatttgaacactagcatgtgaaagttgatattttatttaatatccataattcatatttatattttctattttatacttgttatttatgtttcacattttgtactacttatttatgcttcctattttatgctttttatttatgcttatattttctaattcatatttatgcttcctattttatacttcttatttattcttcatattttatgtttcttatttatgcttcacatttatgctttacatttatactttacatttatacttcacatttatgctttacatttatactttacatttatacttcacatttatgctttacatttatactttacatttatacttcacatttatactttacatttatgctttacatttatactttacatttatgctttacatttatacttcattttatggttaacacttttatatttttattaacttcatacgaatttattgatttattatttatgtatgtatgtagaaatttctaactaatttgtattatttcattcaaagaagaatgtttcacgtgaaacatttcttctttaattgattatctctcagttttacccttgtatctctttggatattagcgtataatataagtatcttaacggggaggtcgtatctatggaaaagcataaacataaattgataactttaggcatactaaccgccatagcaacaggtattatctatgtgatcaaccgcatgatagcagcttccgcaatattaaaggacatgctccatgttaccgagaaaagcttttatgattggcgttttggcaagattttttatacaaaaaaagggaagggcgaaccagtattgttggttcacgacttagtccccggagcatctgcctatgaatggtcaaaagtagaaaagcagctttcagaaaaatacactgtatatactttggatttattgggctgcggacgttcagataagcccaaattaacctatacaaacttcatgtatgtacagttattaacggattttatcaagaacattattgggcaaaaaacggatgtgattgcaagcggctattcctcttcttttgttattatggcctgccataatgaaaaagaatgctttaacaaaattatggttatcaacccaccttcactgaactcattaaatcaagcaccggaccacaatggaaagctctttaaatttgctatagaaattcctgtattcggaaccttagtatacaatatgattacgtccagtgaaaatatcagcaatcattttctggagaactactattacaatccattccacgtagagcaaaataccttggatgcttattatgaatccgctcatagaaatgaaaatagtggaaaatatttatatgcaagtattgttagcaaatatacaaatatcagcattacacatgcagtaaaaaccattgacaacagtattttcattataaatggtgaacaagaaaacaattgcatcgaaatctcagacgcctatatttcttgtaatcctgcaatagaaaaaactgtcatctcccgcaccaagcacctccctcatatggaggagccagagcgtttcctggagcaagttaatattttcctttcctaatatttaacttataaatttctatatttaacaagaacccccagccgctatggctgggggttcttgttaaatccgcgtgatcttaatcttttgaaagaatcttaatcttttaaaagaatcttaatcttttgagagaaattccttccacgagttttgaagattcttaatttcaagtttatttactaaatacttccttccatcatcctttatgcccacatagaaattactatcgtagggataatagtcgattttagttacagttccatcattttcctcaaactcaaagctcaactgagcatcttcactaggtttgtaatcttcttctaaccttctttcagcggcaagattcactgcagaactataaaaggttctaaactccaggctgtcaactttcttattatcaatataatagtttgtcaccatttcctgttccgcttcctctgtatcctcctctgtagttaaagaatcatttatagattcttcctgattctcttcatcagtactgctatcatcctgtgagccttcgttattttcttgattctgagaatcttgatcttcagtactctcctcttcttccatttcttctacttcttctctggcttctaccgtcaccgaagatccctctgtggagactgtgaatttttctacatcagcaataggaacgtaacttactgtaagattccaaaaatcaccggcttttttatccagcagacctgaaagagtttcttccgtcatggtatatatgctgtccgtgccttccagattcacataacgcccatctgaacaggaatttccaatattcagtaccaattgcttatccactttttcttcttctgtctcagtatcttcctcttggacactgttttcttcctggttatccacatcctcctgctcttcttccccttgtttttccacagtttcctgataatttacggtgataactgcataaggctggttcagcccatactcacttttatctgtacagtggtaattgataaattctccgtaagctaaggttcctacagcagacataagtgtgtaggcttcagcggaatctgcttcctccaattctttctgtgattctcccaccagccagccgctggaaacatctgtggatgcttgcaagatataaggattgttctctttatctacttgtatttgctgaatatctgaggaagtcaccgtaggaaagctgtccgcctgagcaaaatcatagagctttcctgtaaaaggagtgagttttgagcctgcaactacataaaccgtcttctcatcttcatttagcctaagataatactgacttgtactgctattttcatttcccacatagattgtctgttcttcatcctcgttatccacaatacggatggtgttttgtggatgatccagtccgtattcttctaaattgtcgatatcttccagaactcggtctgcatccagactttctagctgtgtagtaatatctgtaagtttctcctgtttcagtgggaaattttcatcatttttatacatccatgttccatcattttgttcaaaatccacttcctggccgtccaatgtaaaactaagctctgccacatccgaggcagagacagccagcacctgagctgtctcttgggtatcttcctctgccttttgctcctcggcctttttgttatggtccttcaaaagaaaataagatccggcaagtatcaccaaaaccaaaaggcctgcaatgagttttcccgtctttttcattatgcctttctcctttttaaccaaataacaaaacctgctgccaggaataatcctggtataattccaattgcacaaatgctccagaaactggtatcatatcctgtaatagtcaaataggaaagctgcaggctcttgctgggaacggacacagactgggcttcgctcttgcacatccagctaatagcctgaagcaccagtttatcatttccgccagataccatctgattcatctgatccttaataatattagaggtagaaaaatatactacctgtgtctgctgatcatctcctacctcctcactgactgctacccctagatcaaatggtccgtctatatctccttcctctttctccattgtactgctctggagatcaactttagaaaaagccctctcagatgtgtttaacaagctctgtatatttagagtactgcgcacatcttccagcttctggataccttgtgccaaaggcgctaagatataatacccagaggataccatgtctcctgtaatctcattgctttcaatatttggaagcagataatatggggtttgagcaatgtaatgctgatcatctctctcgatcacaaggccgtctgcccgcttaactccataattttctaatatctcatcaaagtttggtaaatcattttctgtgtaatcagaaaagataagagcttttcccccagcctcaagatagtccaatatataggtcttttcatcttctgatatatcacttgacggagaattcaacaaaattaagtctgcatcgtccggaattttaccctccgtaagaaggttcaaagattggacatctatattatccttttttatggactcctcaatcccagtgtccattatttgttcaccatgaccttcaattacatacataattggcagattttctgaggttacataggatatggcgctggtaagctgtccttcaccatcaaatcctgtggtattgtaggagtatgtggaatagtcaatactggtctcgtacatatcgttatagctgactactttattcttgtctccgcatacaactataatactgttatcactgagctgttcagaggtataagctgaagtaaaaccaggatttacaacaggatccttagtctctactttaaccttggaggaagcgtcctgataccgctccagaagctttgtgaccgtctcatcctctcttccactctggactacctgatagagagtcacctctttgtccaaatccttcaacagttctcttgtctggtctgatatggtgtataacttttcctcgcttacatccagctgcgtatactgagatggtatttctcctacgatcaaattgatgatcaccactgccacaatgagtattgccgttgctgcgatgctgtaggaaccgtttctaatatgctttttacttacatttcccacaagagttctgggagtgatcttttttggtgtcttttctttcttattctgtttcaaacctttcatacctgccctcctagttccagcgtctttttgcaatggtctgtactgtcaaaaagaggcaaattccaataatggacagaaaataaacaactcctgtgatatcaaaaatacccgtagtgaaattttcaaaatgtccgctgatatcaaaaactgtaagtattttctgaatgcctccttcaaaaattccaggttttaaaaggtatgtgatccaaagtaccgcctccagtactcctgcagccacaatggaaaggaatctgtttttgatcatcgtataaaacaccagtaccaaggccactattaatatagaaaatgtgatacaggtggatatggctgtctgtgaaaaaaaggatgagatcccatttatcacgtaaaaggcaaacagcactacaaaggtcaatacagcggcaataacctgactttctgtgatcgaagagataaatactcccactgccagattcgcacaccccagaaggaaaaatccaagtatagccgtatatgcagagctgtaggatatcgtgccgtattttcccatgatcagcggataaaaacataggataaccatggggataaggaaaattgtgatcagagcaaagtattttccaaatacaatgccctcaatggtcaccggcgatgtcaagagtatctggtccgtcttctgctttcgttcctctgccaggatcctcatggttaaaaggggcacactaatcagaaaaataaacgtaatggcatctagtgtcagttcaaatttgggataggctcctgcaatgttgtaggcagtaaaataaatccctgcaatgagtaaaatgaaaaaaataaagatataaccgatcatggaagtgagataacctcttaattctcttttatatatcgctgtcatgctcttcttcctccttcttcgttttctcttcctgttcctccagaacctggtcatttttctcatcctgagtcagctccaggaaaatatcctccagggaagctttgtttgactttaattccaatataggactttcaatctccaccattttataaaaaagctgttctctgatatctaaatggtccttcaccgtgatatcagccttccaggcattttcctcatccttagcaggtttcagttctactttttctactgcctcaatactgttgatcataccggagatctcttttttatctccccggatcaccacttccagttgattggagcccactgccagttttcccagattatccggcgtatcgctggccaccagctttccgtgtgaaatgatcataacataatcgcatacagcacttacctccgaaagtatatgggagcttaagatcacagtatgtttttccttcaatcctttaatcaaggaacggatctctatgatctgctttggatcaagtcccaccgtaggttcatccaggatgatcacttccgggtatcctaaaattgcctgtgccagccctaccctctggcggtatcctttagaaaggtttttgatcagccggtttttcatatccgtgatcttaaccatttccattacttcctctatcatttgtactttctgtgattttgggattttcttcagatcagccacaaatttcagatactccaataccgtcatttcaaaatacaacgggggctgctccggaagatatccaatgcatttctttgccttctccggctcttccagaatgttgtgcccgtcaatggtaatatctccttttgttgatgcgatataaccggttatcatgttcattgttgttgattttccggctccgtttggcccaagaaaaccgtagatcttacccttttcgatttgaaaggataaatgatccacagccacatggtccccatacttttttacaagattgttcacttgaatcaaagcagctctcctccttctactgtcttactaatgcaggaaaaggcgtctcaccgctctcctccccatccatgagggatttgctggagggacacactttcccattacatgaaaaaacggacaccttgaagggatagggtaggggatttatcaaggtgccctttcttaggaaattttatgaaaaaattgtgatgaaaataggttaaaactgtgattattttgtgaaaaaaaccgctctgtaaatcttcatctacagaacggtttctatattcctatttttcagttcaagttagaaagctttcaagtgtggctgatgtaaaccttctttgggaattgtctttctgtgaagatttcaggagccaagtggcattttggcaggtgtacctgcctttctgggatacttctccggggttttctgcaatttacggatgatcacaaagcaacgctcaatgtctgtgccgggaagggtaaaatataccgtatcctccaccacccctccaagaagcttgactgccttggcgctctgctgcacttcttcttgaaccttgccagatttgtaggctgcaaaaattccgcccacctttacaaatggcagacagtattcacttaaggttgccagattagccactgctcttgatacacaaaggtcatagatttcccggtaacccttctgcctggcaaagtcttcagctctgccatgaactcccataatatgcttcacgcctatggccgacatcgcctcttccaaaaacagcactctttttttcagagaatccataagacatacttgaaggtggggataggcaatttttaagggaattccaggaaatcctgctccggttcctatatcgatcatcgtcttaacatcattcatgggaactgctttcaccactgccaggctgtctaaaaagtgttttgccagaacctcatcaaattctgtaatactggtcaggttcaccagcttatttctctctatcagaaattcatagtatttaataaactgtattttctgctcttctgtcagggatatgccaagctccctgcaaccgttttccaagatacttaagtcataggacatattgtttacctccttttgcggtattgttccagatacaccaacaggacggaaatatcagccggagacaccccggatattctggatgcctgtcctatggacacaggacggtaaagctccagtttctgccgggcttcaatgcgcaggctgccgactttctcataatcgagatcctccgggattttcttggcctccagcttcttgaactgctccacctgtctgagctgccggcggatatacccatcgtatttaatgttgatctccacctgctgggccacatcccagggcagctttgggcgctggggatccacaggggcaagggcctcataggacagctctggtctgcgcatcaattctgccagagttgttccgctttttaaaggtgtactttcgtacttttccaaaagctcctggacctgggcggttgcacctagattggtgtgttccgcccggtttatttcttcttgaatctgcttttcttttatcagcagcttctgatacctttcttcatccacaagaccgacctgaaagccaatttttccaagacgcaggtctgcattgtcctgacgcagcaatagtctgtattctgcccggctggtcatcatccggtagggttcatgattttcctttgtgaccagatcatcaatgagaacccctatatacgcctgagagcggtccagaatgatcatctcttttccctttattttcagggcggcattcatacccgcgatcagaccctgggcagcggcctcctcatagccggagctgccgttaaactgtcctgcactgaaaagtcctttgatctttttaaattccagggtaggatttaactgacggggattgatgcagtcatattcaatggcgtaggcattttttacgattctggcattctctaagccaggaacagaacggtacatttcgtactgaacatcctctgggagagagctggacattcctcccacatacatctcattggtatagagtccctctggttcaatgaacacctgatgcctgtctttatcagcaaatttaaccaccttgtcctcaatggagggacaatatctggggccggtgccttcaatagctccggaaaacaacggacttctatccagattccttctgataatgtcatgggtcttctcatttgtataagtaagccagcaagacacctgttcagtctggatatcttccggatttgtggaaaaagagaagggaacgatctgtttatccccaaactgttcttccattttggaataatcaatactgtttccggcaattctggcaggtgttcctgttttaaaacggaacatctccactcccagctcttttagagaatctgtcaggtaattggcagcctgaagaccattgggtcctgtataattactcacatctccatagatacacctggccttcaggtaggttccggtacaaagaatcacggctttacagtaatagactgcctttgagtaggtctccactcccacaattttctgctcctctgtgaggagctttgtcacctctccttgcttgatggtaagatgctctgtattttccagagtcctgcgcatctcattgctgtaggcctgtttgtctgcctgggcccgcagggaatgcacagcaggtcccttggaacggttcagcattttggactgaataaaggttttatcaatattcttccccatctctcctccaagggcatccagttctctcaccaaatgtcctttggagcttccacctatgtttggattgcagggcatgagggcaatgctgtccacactcacggtaaacattatggtctcaaggcctaaacgtgcggctgcaagagcggcctcacagcctgcatgtccggctcctactactacaacatcataattttgtattaactgggtcacaagtccttatcctctctgtatgatcattttattgtttttcatcatatcataatttttctgtatctgccataaaatctgcctctgttttccctgtaaaagaaagccagcaggtaatgccccgcaggtgtcctcatttatgaattcagtgaagcacacagccagcggccactggtagtcatttacccatacagaatttactgaagatctcatttaccaggtcttctcccacagattccccaaggatttttccaagggcttcgtaggcattcattaaatcaatggaaaaaaagtcctccggcatctgaagagcgatgctgttttccacctgaataaggctctccagggcctcctccagagcagccttgtgcctggcattggtaatgtaaacctggtcattaaaggtaagactcccctgaaagaacatatccttaatggtattttccagctcctccactccctgctcttccttggcagagatagggattaccggataggaaacctgctgctttaattcctggatatctacaagggagggcagatccgttttattataaaggacaatggcttttttgtctgtgagcatgctcatgatctctgtgtcgttttcatccaggggggcggaggaatccaccacatataagatcagatctgcatccctggcattttcctttgccctgcccacgccgatcatttctaccacatcctgggtatcccggattcctgcggtgtccaccattttcagggtgatgccatgaaggttgatgtattcctccagaatatctcttgttgttccggcaatgtctgtgactatagctttgttctctcccaccagaagatttaagagtgaggattttcctgcgttaggcttacctaagatcacagttttgattccctcctgaatgatctttccgtcggatactgattccagcagtttggtgatcctgaccttttccttctgtatggccaactccagctcttctgggtagttgtccagagaaatatgctccgggtcatccagggctgactcaatgtaggcaatgtgatagatcagggaactgcgtatgtctttgatgactttcattacagaacccttcaattggttcatggagcttctaagggcatactggttttttgcctggataacatccatgacagcctctgcctgagacagatccagacggccgtttaagaaggctctctttgtaaattctcctggctctgcaatgagtgcaccattttttaagaccgtctccaacactcttttcatggcgcagacacctccatgacagtcaatctccacagtatcctctccggtaaaggttctgggcgcccgcatcagcattaccagaacttcatccacaagctcctcttggtcatagatgtaaccataatgaatggtgtgggaggcctgttccttgatttttttctttccattctttgaccgataaatacgagcgatcacgtcaaaagcctcagccccgctgattctcacgatcccgatccccgatgcggtcattgcagtagatatggcagcaattgtggtctccatgttatcctccttgttcctggattttttagcaggttatcaacatttttcttaattatacacaataaacagcgaagaatacaaaaaatgttattccaggcagcccacgttttcacgtgttattcatgctttcacctagaataacattttttaatatcagtttttctttaattttactactacatggcggtatggctcttcgccctcgctggtagtctccacaaatttatttccctgaagagctgagtggataattcttctctcataaggattcatgggctcaagaaccactggctttctggttttctttaccttaaaagcaattcctcttgccagattttccagagtttcttttcttctgcgcctataatcctctgtatcaagctttacacgaatgtaatttgcttttcccttgttgacgaccaggctggttagatactgcagggaatccagggtctgtcccctttttccgatcaagatccccatatcctcaccttcaaaatcaacctccaggcttccgtcctggctgttatatttggatgtgatctccacttccccaaggttcatggactggaaaacctctgccaggaaaattcttgccctctcttccacatccttgatctcttccggatctgtgagaatttccaccggctttgctggcttggcaggtttctcttttacaggcttttccttattttccttaacaggcttttccttattttccttaacaggcttttcctttgccggcctttccttcactggtttgtctttctgagttctttccttgtgctgctctgcctttggctgtgcaggacgcttcacaggtttttccttcttgggctgaggtgcaggtgccgctggctcttcctggacagcttctttttcctctatttcttcctttacgacagacaccatttcttctacttcttccagctcctgggtctgttcttttctgcgggccttaatgaccgccggcttactgccaaaaccaaaaaatccagagctgccttcgctgacgatctgaatttccagattatcactggatgttcctaactgaatggatgccttaatgatggcttcatcctttgtttttgcctgaacctgaataaaatcctccatagtacccctccgttcttacttacttcttacgtttgtttctctcatcaaaatctctcaccatattcgctttggctgtaatacttccgggcttggcattggctgctttctggtaggattcttcgattttcttatttttctcggaggaagcggtaccgctggctcctttttcaatccgactgatgttctttacgttctggtgggcctgggctgtgatcttctggggaggaaggccttccttctctctcttcttctcgatcttcttcatattttcatcgatgagatcctgaatattgatcttattcatatgccggttaatgaccacctgctgcacacttcgcaccaacgcactggcaatccagtagataccaagacctacagggaaggtaaagcaaaatactgctgacatcaaaggcatgacggtattcatggtcttcatggagttcatcattgcatttggctgatctccagaaggagcagcctgaggcatcagcttgatgttcatcatctgtgtgaaccaagctaagaacggaattaacactgccccgatcaccagcagaaaagagcctgcggcaaaagccgttttaataatgttcaaaggcatgtcggcaatgttcaggccaaggaagttctgcatcttggagatctctgtcgccgtgctgtctatgattccggagaatccggaaaattctttcatatcagccagtttatcccactgactgggggacaatgcatacaaaaagtcaatcacagagtttcctgtggctttatctgcagaatccatcaccagctgaactcttgaaatcttgttgtctgtgataaaattactaataagctgtgtatatccatctacgtttacaatgtggctcaccgcatctgtaaatacatctctgactgcccctacgtatgcaggaatattatagataacctgccacaaggacatcaggatagggaactggatggcaagctggacacagcttcctgttggagatactccgtatttctgataaacagcctgtgtctcctcctgcattttctgcatggacacctggtctcttttaccctgatatttcttctggatcttctggatctccggctgcataatggaactcaatttggaaaacttctgttgtttgatctgcaacggagtcattaatgcaaaaattataatactgaaaatgatgatacaaaggccaatattctggattccaaacaaaccatccagcaccttatagataccattcatgatccatcccataacggatgcgacttgtcctaagatcggcaccccgctcttagttaataaaatcatttccaaaattctcttcctcctagtaggaatgtaattcttctactgctatttacggcacgggatcataaccgccgtgggagaaaggattacaacgtaaaattctccacactgcaagaagaccgcccttcagggcgccgtatttttgtattgcttccaatccatactgagaacatgtgggaatataagggcatttggttctcttcatgggggaaaggtatatctggtaaagacgtatcatcttgatcatcaatttttttatcatgattctcacgctccatttttgccggatgacggctgatcaacagttaaatgatgacgggaagcaaggtggagaagggcactttcaatttccttgtaagacttgtcccctgccgccaccctggctaccactacaatgtcatatccaattttaaataaagcttcatttaaacgataactttctcttaccagcctggtgactctgtggcgtaccacactatttccaacttttttacttactgatattcccaaacgattcttcctgtattggttttccaatacgtacatcaccaggtatttatttgcgtatgatgttccggttttatacacaaattgaaaatctttgttttttttcaaggactctccgtttttcatcgaatcctcctttgcctgtcttctttaaaaattaagaagagaagaaaagaccacataactgcggtcttatgctgataaacgttttcttccttttaatcttcttgcagctaaaactttacgtccaccttttgtagacattctggatctgaatccatgaacttttgctctctgtctctttttaggctgaaatgtcattttcataggtaaggcacctcctttatctattgataaaacatgatttttttccatttagaacatcatttcaattatatgcagaaaccgttgtttcgtcaagtaaaaattaagatgttcccatattctttttcattttctgtggttgacgtaacattatccacaaaatgtggataacttgtggataacttgtggattagccgacaaaatttccactttttttacacacgcatacacattttctttgaaaaatcctattttttgaggctttataacttttttcgacttatacacattttttccaataatcttttattatggtaacttcccttatttttgggcattgcgaaaacttcatatttattataatatataaaaggatatctatctttatatgacaaagtgaaggttttttgggggaaacgatcctgtggacagcccctttatggccttccttaaaatacatgtaagttttatcattacgctaaaataggagagactgctgaccatgaatataatagaggaaaaatgggacgagattctacaaattgtaaaaattgaacacgacttaagtgaagtttcctttaatacatggattcgccctttgaaagtttacaaagtagaaggaaatgtggttaccgtccttgttccttctgaacaggttgccctgaattatataaacaaacggtacaagctccccctccaggttaccatcagcgaagtggccggtatggatgactgtgaggtgaaatttattcttccaggagatgtggaagagaaaaagaacctctcctattcttcaggcgaccagaattccaggtttgaagaggcgaatctgaatccgaaatatacctttgacacctttgttgtgggaagcaacaacaaatttgcccaggctgctgcccttgctgtggcggaatctccgggggatatttacaatccgctgttcatctatggaggtgcaggacttgggaaaacccatcttatgcattccatagcacatttcattattgaaaatgatcccagcagcaaggtgctttatgtcaccagtgaagaatttaccaatgaactgattgaaaccatccgaaacgggaataattcagccatgagcaaattccgggataaatataggaacattgacgtactgttagtggatgatgttcagtttattataggaaaggaatctacccaggaagaatttttccataccttcaacaccttacatagcgccaaaaaacagattatcatatcctcagacaagccgcccaaagatatggagattttggaagagcggatccgttcccgttttgaatggggactgatcgctgatatctcctctccagattatgaaaccagaatggccattctccggaaaaaggaagaaatggacggctataatgtgagtgaggatgttattgaatatattgccacaaatattaagtccaatatccgggagctggaaggctctctgaataaggttatggcttttgccaacctagttcataaggaagtaaccctggaattagcagaagaggtgctcaaggatatcatctctcctgatgaaaaaaaggtgatcacaccagagctgatcctctctgtggttgccgaacattataatgtaactgttcctgacctggtgggaaataaaagaaattccaaaattgtagccccgcgacaggttgccatgtacctctgccgggaaatgatcgacctacaattaaagctgatcggcaaaagtattgggaaccgggaccatactacgatcatccatggaatcgaaaaaatagaaaaagagatggaaacctcagaatccatgcgaaataccatagaaatcttaaagaaaaagattaatccacacggataggactacttatccacattgctactgtatagaatgttactttaatgtgaatggatgtgcataaactttttgccaatttttcagcttgaagttgtgcacagtccatacactggtttcagtttgactttaaacagagttatcctaccttaaagttcctttatttacgggcttgaacatagtttttcacaaattcacagcccctacggcgattgcggcggataagttctttaattatttatttaaaaacagcagtttttccaggaagggagttattcacattatgaaaatcatctgttcaaaatcaaatttacttaaaagcgtcaatatatctctgaaagcagttccttcaaaaacaacaatgccaatactagagtgcattctcattgatgcctctgccaaccagatcaaatttacaaccaatgatatggaactaggtatcgagaccattgttgaaggtaccatttctgaaaaaggcatgatcgcactggatgctaaaattttttatgagattatcagaagacttcctgataatgatgttactttacagaccaatgagaactacacggttaccatcacctgtgaaaaagcaaaattcaatattccaggaaaatcaggagaagactttgcctatcttcctgttattgaaagagatgaatccctcaccatttctcagtatactttgaaagagatgatccgtcagaccattttctctattgctgttaatgagaataataagctgatgaccggtgaattatttgaaatcaaagataattatctgaagattgtatctctggacggccataggatcgccatccgtaaaatggaactgaagagaaattataatgacagaaaggtagtggttcccggaaagaccttaaatgagatcagtaaaattctgtctggtgaggtggatgaccaggtaagtatttacttttcaaaaaaccatattctttttgagtttgacaataccattgtaatttccagattgatcgaaggagaatatttccgtattgaccaaatgctctccagtgattatgaaacaaagcttgagattaacaaaaaagaatttttagattgtattgaccgtgcaactcttcttgtaagagagggagataaaaagcctattatcattaatatttcagacacaaagatggaattgcgcattgattctgtcatgggatctatgaatgaagatattgatatacaaaaagaaggcaaggatatcctcattggttttaatcctaaatttttggtggatgcactgaaggttattgatgatgaaaccattaccatatatctggtaaaccccaaggctccttgttttattcgggatgaacaacaaacctatacttacttgatcctgcctgtaaactttaaccaggccaggtagtgtccgtgtgtaaaagatatactattcattgaaatgcataattatgcaaagaaagaagagaaatctatgatggaaattaaaatccgtgatgagtttataaaattaggtcaggctctgaagctggcaggtatggtggaagacggagtggaagcaaagtatgtgatccaggataaaaaagtcaaggtgaacggggaagtggatgacagacggggcagaaagctttatgaaggggatgtgatctcctataagggagaggacatgaagattgtcaggtgatttatgtacattgagtccattcaattaaaaaatttcagaaattatcagtcccttgagatgaagtttgaccaagggactaatatcttgtatggagataatgcccagggtaagacaaatgtgttggaggctgtctatctgtgcgggaccaccaaatctcacagaggcagcaaggacagagagatcattcagtttcaaaaggaggagtctcatatccggatgatggtgcataaggattctatgtcttataaaatagacatgcatctgaaaaagaacaaggcaaagggtgtggccatcaatgggattcctattcgcaaggccagggaattgtttgggattgtgaatctggtgtttttctctccggaggatttgaatattataaaaaatggtccgggggagagacggcggtttctggatatggagctgtgccagctggataagatctatctcacagatctgggaaattataatcacattgtgaaccagagaaataagcttctgcgggacttgttttttaagcctgatctaaaggacactctggatatttgggacatgcagatgcttcagtatggacagaggatcattaagatgagaacggaatttatccaggagctgaatgtgttaatccgggaaattcataaaaatctcacaggtggtctggaggagctggagattgtctatgagccaagtgtgcaggccgaggattttgaaaaacagcttttcaataaccgggacagagatctgagacttaaaatgacaagccaggggcctcacagagatgatctgtgtgtgaacgtgaatgggattgatatccgcagatatggttcccagggccagcagagaaccgcagccctgtcgctgaagctatcggaaatttatctggttaagaaaagaattcatgacacaccgatcttgcttctggatgatgtactttcagagctggacagcagcaggcagacgtatttgctgaatagtatccatgacatccagactttgatcacttgtacagggttggatgattttatcagtcatcagtttaagatcaacaaagtattccatgtcattaagggagaagtttttgagccgtaaagtgaatgggatatttcataaggttccattcaacaagaacaaaccagcaacagaaatttgcatattgccagtaaagtattttgacaggataataagcctatgataaactggatgaaagaaagatggtgaatacgttggacaaagaagaatttcggattaaactggaagaaatcaataatcttgtagaaaaaaaagattacaaaaacgccatgaaagtggtggacagcattgattggcggaaggtgaaaagtgcgcgcacgctgagtatcgtgggtgaaatttatgctgccaataaaaggtatgaggacagtatggaaattctgcttctggcttaccaccgggcaggtattggaaagaatattctctaccgacttattgaaatctctctgaaaatgggaaatctggaagaggccgatgatttttacaaggagtatacggaaattgcccccaacgataatgcccgttatatcctgcagtataaaattctaaagactaagaacgcccctgttcaggaacagattcaggctttggaagagtacaaggaaaaggaatttacggagcggtggtcctatgaacttgccaagctgtattataaagcaggggaaaaggaaaagtgcattgacctgtgcgatactatgattttatggttcagtgacggcaagtatgtgatgaaggctatggaccttaaaatgcgcatgggagttctcacgggagatgagagaagaaggtatgaggaacagtttgttcctaagctgatcacgcccgaggacattgccattcttaaggaaaacctgggggaaggtcaagaaaaagaagcagaagagggagacctggaagaagagctttccgggattgagcccattaaggtacaaaaggaagaagagaagagatcccaggaggctgtcctggccggagcgggaaagggcgttttccaggagaagctcaccaagggctttaaagatattttcggcaagaagaaacaggccaaggatgagggagacctattccagtctgaatttgagaaggatgatatcatcgcacagatgaatattaagcacagagacagggaggaagattcctatggagatgttccttatctggagcctgagatgctggattctgtgggccaggatgaggaacagagatctgaggaagagaagcttctggaaagctttcagcaggagcgggaagaggaagaagcctctcaggaggataaggaagagggctttgtttttaaacagcccaagcccatggacattccaccctctatgaaaacttccgcattaccggatcctgaactgatcagacagatcttaaatgagaaaaagcagatggaggagcaggcagcggctgcatctgatgaacctgaggagagtccggattttgattttaatctggaggatactattttagcagcggcaactgcccaagggatccagtttggaggaagcagttccaaggaggatgagagtgatctctttgtgagtgaaactcctgaggaagaggaatttgaagaagagacttcaacagaggaggagcaggcttctgtatttgcttctgagtcccctgaggaaatcccggataatttcatagagaaaatccaaaaagaggttgagaagaaggctgagtttttcaaggaatctacagttgtaccccaggaggacaagcctgaggaaattcctttcctggaggaggaagtgatctcggtagagccggaatggaaacaagagacaccggtacaggaggaagaggctgcagctgttcccattgaggaagaacagcccgagacggaacctgaggaggaaaaaccggaattaaagaagttcagcgaacaggtaaagaagattctggagcaggaagaaaaagaaaaaactcctgagacagaagaagaaaagctggaaagtttcattgactccatgaatccggaaccggaaattgatcccacagatataattccacgacagatgaagcttaccaaggaagaagagcagcttttcacttactttgtaaaggttccaggaatgaaagagcagcttctagatatgcttttggatatgcaggattctgcggcagataagacctcaaaaacaggaaatatcgtggtgatgggagccagggagacaggtaagacgcggctgatctcagccatcataccagctgtgtgcaaggagctgcatatggaagcggctaaggtggcttatgtttttgcagaacagatcaatggaaaaaatattcccaagatcataggaaagctgtcaggaggttttttggtcattgaaaatgccaatcagatggaccaagagactgcagataagctgaacaaggccatggagttccgtacagacggccttacggttattctggaggatgagaagattggaatgagaaagtttctggcccggtatccaaagcttgccaagaagttcacctccatgatcaatattcctgtatttaccaatgatgagctggtgaattttgcgaaggtatatacaaatgaaaacggatacagcattgaccagatgggacttttggccctttataatatgatcagccagaaccagaaggaagatgaacctatgaccatcgggggcgtaaagaatctggtggatgatgccatttccaaatcgcaaagcggaatgagaaagctgaagagaaatctttctaagacacgcgtggacagagacggtttcattattttgtatgagaaggattttagctgataataaataaaaggatgattgatattatgaccaaaccttatcttggaaatccaaagtataccattgaagttctccagaagtatgattttgtttttcaaaaaaggtttggtcaaaattttttgatcgacacccatgtgctggacaagatcatttcttctgctcagatcacaaaggaggattttgtgttggagatcggtccgggaattgggactatgacacagtatctggctgctgctgccagggaagtggcggcagtggagattgatgatgctctgattcccattttggcagataccttacaggattttgaaaatgtgacagtgatacacaaagatattctgaagctggatattcaaggtctggttcaggagaagaaccagggaagacccatcaaggtggtggcaaatctgccctactatattacaactcccattattatgggactattcgaaaaccaggttcccattgaatccatcacgatcatggttcagaaggaagtggcacagagaatgcaggtggggccggggaccaaggaatatggcgccttgtctttggctgtgcagtattatgccaaaccagagattgtggcaaatgtgcctcccaactgctttatgccaaggccaaaggtgggaagtgcggtgatccggcttacccgtcataaggagccggccgtgtatgtggaggatgaaaagctgatgttccgtctgatccgggcatcctttaaccagaggagaaagactcttgccaacggattgaagaattctggtgaattgaactacacaaaggagcaggtggagcagtgcatcaaagcctgcggcctgtctttgaatatcaggggagaggctttaaagctggagcaatttgcagatctggcaaatgaattcaagaaattagaaaattgatacatggatttacaataaaaatagaacgcccgagagcgttctatttttatttatcaaatattttttaaaggaaggagagccggctgcttaagcaaccgacatatgaaaaagaaaattaataaaaataatattggctgttattatttttatagtcttagtatattgaaaaaatgtgaggatttcgtgtttaacttattaaaaaataatgaacgaatatcaaatgttttgtgaataggtactgataaagtggctggcacatatggtaacgccgcctaagagctctgacagatcctgaatttctcccactgccagggatacggtgtcacggttggaactctccagttttccacggatctgatcagagattcccggaatgtaatttgtaaaggagctgtttaggatgatcaattcagggttataggtatagatcatattgttgatggtgatggacatataggagacaaatttgtccatcagatcctgggcaagagaatctccttcattgtagtctctgatgaacttttcaatggtcacaaaggaaagctttttagccgcggcgtagtcattgaggatcgcctgctcagaggcgtattgttccagacatccattatttccgcagggacatttccggccgcctggaaacaggatggtatgtccaatctctcctgcgtagccgtttcggcctttaaacacctttccgtcaatgagaatcccagagccaatgccagagtgcacattgatgtagatcatgttttggttttcatagtgataggtggattctcccagaacacacaggttggcatcattctcaataaaaaagggaatttggaatttctcttccagaatggaacagaaatttttcttatcttccagataataatggggagtaaagagaacctgcttttcttttaccacgccgtagacacccagacagatgccgactactccgtaaggggcgggagggattccacggatggtccagttgatgatcttggaaatttcctctatggttacctgaaagccttctcgtctgtattcttttaagctgcagccctctcccttcaggtcagagaccagcacagttacagtatttactccaatgtccatggagatcacgtaaccgcaggttttatgaaaccgaaggaggatgggttttctaccaagggctgtttcaccgcttccaatttcttcaataaggtgtttatctaaaagctcttgtacaatgctggatatggttgcctttgtgagcttgcacttttttgccaggtctgccctggaaagaggggaagactcgatcagtgtttttaatacaaggtgacggttaatttctctgataaattcctgactgccagtactcataaatgtcccttctgaaaaatacaatgtttattagcatcctgcatatccttttggaaatcagtttgtgctgattttattttagcatattttcacagaggaatgtagtcaaattttagagccggaccgtgaaaagggatatactccctggtgctgggaaaggagattttatagaatgttaagaaacataaacaactgtttgtgttataatggtggccgtaccagaaaatctgactgcctggaagcaggcctaaagaaagaagggaaaatcaatatgagattaaaaaaattgacagcagttttattgacaagtgttatgctggtcagcgttccaaccgcagcatttgcaggcgaggacgcaagcagcggtacggcactggaatccgtgttaagtgaggaacaagaagagatgatctccagtgcgctggatacctacggggatgatctggcagaattggcgggaagtcctgaaaaggtggcagatattattgtatatttgaaagagcagatgcagggagtagagctttccgatgatgaaatcctttccattgtcaatgaggcatcggagcagtttggcattaccttcacagaggaggaaaagggaaagatcgttcagctggccagaaagttccaggatttagatattgatgcagataagcttacagccaccattacttccgtttatgaaagtctgggcttttccaatgaggatgtgaaaggcatagccgcaaagtttatccaatgggtcaaagggctttttgactaaaattacagcgatctatggttaaaatacacaaaaaaaaagaaaaatgaatgaaaaaattgtgtaaataatcaaatatttacagtttgttcatataatgttcatatataactgctatgatagcattgttcgtaagaacaagcaaaagagaaaggtaatgttttcattacacataaattttttcataataattgccccggtaaaccactaccggggcactcctcattttatgggatttcagggcttgggaggcaggccgtattgctggatctctctgttcagctccagcatcctttcatccagatttgccacgatctttgcgcattcccgcagctcctgagaaatggtctcagggccgtcaccttcaaatttgtaatgtatcttatgctccagactggcccagaaatcttgggctacggttctaatctgaatttccaccttggtatcgatcacagaatctgacagatatacaggaattgtaaccagaatgtgatagctgcggtagccgctcacttttgggtttttcatgtaatccttgacggataggatcgtcaggtcactttgattggagatcatgtcagcaatgagataaatgtcagcagtaaaggaacaaatgatgcggatacctgcaatatcatttacatagcggaccatattttctgtggttgcctcataaccgtagcgtttcagcttttttacaatgctttccggtgttttgatccggtatttaatgtgctcaatgggattatatttatgacggtgctgaaattcgtcatttaaaatatctatttttgtctttatttgtttcaatgcagaattgtaaagaaaaataacggtttcccagtcatcgatttctttaaaataacgcaggggaacagattcctttttcaaatatagccaccccttttcctgttcgtaaggaaccgtctcaggactgtaaaacaggaacagcctgaaatctgtttttattatatcataagaaaaacaggggcgtaaaggctttccatataaagaaacaggtaaaaaccggactttccaatagtttggagccgtggtataataagtccaatagtctacgacaaggaaaggagaaaattaccatgtctgaaacaatgaaggattatgaggcagaattggaggcctcttttaagagaattgaagaaggtgacattttaacaggaacggtgatcagtgtaaatgaggaggaaattatcctggatctgaaatattacgcagaggggatcatccgtgtggaggatttcagcagagagccgggcttccagattaaggaagaggttcatgtgggtgatgagatttctgcaactgtgatcagaaaagatgacggccatggaaatattttactgtccagagtggaagcaaatgacattttgtcctgggataaattacaggaactgaaggacaataagactattctggatgttgtggtaaagggtgtggtgaaatctggggtgattgcctatgtggagggcatccgaggatttatccctgcctctaagctgtctctgaattacgtagaggatttggaagagtttttgaataaacccatccaggtacaggtttttgatgtgaacaaagaggagaacagactcattctctctgccagagagattttaagggaaaaggcagagcaggagaggaagacgaaggtatccaatctggaaatagggctggtcacagaaggggttgtggagagcctgcagccatacggggcttttgtgaaccttggaaacggtctgtccggtcttgtgcatatttcacagatttctgagaagaggatcaagaaaccgtctgaggtgctatcagagggtgacaaggtaaaggtgaagatcattggtatcaaagacggtaagatcagcctcagcatgaaagcccttgcggatgtcatgtcaaaggatattgaggaggagacgtaccaaatgcctgatacggaggaggctaccacctctctgggttctctttttgcaaatattaaactcgattaaaaagggagtcatttatgaaaaatcagcagaaaatttttatcatcggacataaaaatccggatacggattctatttgttctgccattgcctatgcggatattaagaaccgcacctcccaggcaagaaaatatattcccaaaagagcaggacagatcagcgaagaaacggaatatgtgctgaaccgttttcaggttgatcctccgggatatctggctaatgtgggaacccaggtgaaggatatggatatccgtgagagtcctgacgtggacaaaagcttttcgctgaaaaatgcctgggatatcatgcaggagaattccattgtgtcacttcccatccggggaaaggatggaagcttagagggtttggtcaccatcggggatattgccaagacctatatggataccacggacagctatcttctgtctaatgcccgcacccagtacaaaagaatcgtggaaaccatagacggaaccttgctggtgggaaatgaacatggatattttatcaagggcaaggtactcatcggtgcctctcatccagatatgatgaaggaatatattgaagaaaatgatctgctgatcatgggaaaccgtgaggaagaccatctacaggccatagaaaaaaacgtgagctgtatcattgtgtgcatgggggctgagatcacagaccaggtgaaggccctggcccaggaaaaggatattgtgatcatcatatccccttatgatacctttacggttgccaggctcatcaatcagagcattcctgtccggtatgtgatgaaaacagagaatctggtcacctttaatacagaggattttacagacgatattcaggaaattatggtaaagcaccgtcatcgtgcttttccagtgatcaataaaaggggaaaatgtataggtaccatttcccggagaaattttcttgacatgcataaaaagcaggtgatcctggtggatcacaatgaaaagaatcaggcagttgacaatattgaaaaggctgagatcctggaaattattgaccaccataagctgggcagtctggaaaccattaagcccgtcatgttccgcaaccagccggtaggatgtaccgctacgatcatgtaccagatctatggagaacagaagctggagatctctccgaaaatggctggacttctgtgtgcagcgatcatttcggacacacttatgttccgttctcccacctgtacccttcaggataagatggcagcgggagctctggctctcatcgcaggcattgagatcgaaaagtttgccaaggagatgtttgcagcgggaagtaatctgaaagataaaactccggaagagattttctttcaggactataagaaatttatggctgagggagagatcacttttggtgtgggacagatcagctccatggatcaggaggaactggaggagatcaaggagcgtctgattccatttattaaaaatgaatgtggaaggcatgggatcccaattgtgtattttatgctgacaaacatcattgaggagtctaccaaattgctctactatggtgaaaacagtgagcttcttgccaggacagcctttaataaggagcctttgggagatgaattctatctggagggtgtggtgtccagaaagaagcagctgatcccagcaatgatggaggcggcgcagctcattaacagtgattatgcttaatagaagggcgggaaaagcgtgggaaagcagcagtggaagcctggaaatatgatctatccccttcctgcagtgatggtatcagtcacagacggacatggaaatgacaatattatcacagtggcatgggttggcaccgtgtgtaccaacccgcctatggtgtcaatctcggtgcggccggagcggtattcatatgacatgctcagggacacaggggagtttgtgatcaatcttacaacagaggaattaagttatgctgttgattactgcggtgtgcgttccggaagagaggttgacaaatttaaagagatgaagctcacaaaggagaaagcagcctttgtgcaggcacctatgatcgcccagtcaccggtatccattgagtgcagggtgacagaggtgaaggagcttggatcccatcatatgtttctggcaaaagtcctgtgtgttcatgcagatgagaaatatatggatgaaacaggaaaattcaggctgaatgatgccggtccccttatttactctcatggtgaatattatggaattggagagaaaaaggggaaattcggatatagtgtgagaaaaagggaaaagaggagtagaaatactcaaaaaagttgacataatttattcgttgcaaaggcttgacaatcatggtagaatgaaaggacatggataaatggataatataatcttgattggcatgccgggagtgggcaagagtacactgggtgtgatccttgctaaggttttaggctgccagtttttagatgcagatttgttgatccagaaggaagaaaataaacggctgtatcagattattgatgaggttggtacggacggttttatggaagtggagaacagagtcaatgcatccattgaagctgagaaaacagtgatcgctacaggagggagtgtggtttactgtcaggaggcaatggagcatttgaaatccattggaacagtggtttatttaaaattgtctcttaaggctttgtcgaaacgtcttggaaatcttacaaggcggggtgtgatattgaagaatggacagactttgaaggatttatatgaagagcgggttcctctgtatgaaaaatatgcagatgtgactgtagacgaagaggggaaagatttggaaggaagtttacaggatgttctggatatactaaagcgcagttaaatgacaactgatctgaggaactttatttacaaatcggatgtgaatggttataatagactcttatacatccaggagtataaataataatgtttaaaaaatcgcattatagactgcctatctgttttaggggctataataaacatagaggtgtgttatggaacagtatataatcaaaggcggaaatccgcttgtgggtgaagtggatatcgcaggtgcaaaaaatgcagctctgccaattctggctgctgctattatgactgatgaaaccatattgattgaaaatctgccggatgttcgggacatcaatgttttattggaagcaatctcacaaataggagcgcaggtggaacgggtggatcgttccacagtaaaaattaacgggtctaccattcaggatattagtgtagattatgaatttataaaaaaaatcagagcttcttattatcttttgggagcactcttgggaaaatacaagcatgcagaggttcctctgccgggcggatgtaatatcggaagccgtcctattgatcagcatttaaaaggatttcgagcattaggtgccaacgtggatatttaccatggtgctattgttgcaaaggcagataatctgaggggaagtcatattttcctggatatggtctctgtgggagcaaccattaatattatgatggctgctgctatggctccgggaagaaccattattgaaaatgcggccagagagcctcatgtggttgatgtggcaaacttcctgaacagtatgggcgccaatattcgtggggcgggtacagatgtgatccggatccggggcgtggaaaagatgcacagcaccagatattctattataccggaccagattgaagcaggcacttttatgtttgcagcagcggcaaccggcggggatgtgacggtgagaaacgtcattccaaagcatttggaagccacaacggcgaaattagaggaaattggctgcgaggttgaggaattcgatgactctgtgcgtgtgcgggcaggcagaaagctgtgcaggacacatgtaaagacgcttccttacccgggatatcccacagacatgcagccgcagatcgcagtaactttggcagtcgcagaagggacaagcattgtgacggagagtatttttgagaaccgtttcaaatatgcggacgagctggccagaatgggtgcgaatattaaggtggaaggcaacactgcaattatagacggcgtgaagaagctcacaggagcaagagtgagtgcgccggaccttcgtgcaggggcagcgctggtgatcgcagggctggcagcagagggtgtgacgattgtggatgatattgtatatattcagcggggttatgaaaaattcgaggagaagctgagaactctgggcgctgagatcgagaaggtctcttccgagaaggaaattcagaaattccggcttcgtgtaggctgataataaggagcaggcagaggataaaatcttttgcctgccaaaatgggtaacctgccagatatggtttttggtggggagacggtttttttaataaaaaaagttcttgacgaacacacagagatagagtattgtattcgtcagaacaatatacagtttttctcttattcagagtggcggagatacataggatctgtgaaaccacggcaaccccggagacggaaggtgccagcctgagcgatgatttcgaacaataagaggatttcatatgagattacatttcatgaagtccatcttatgatggatttttttgttacaaaggaaagctgctttgtagctgcacactggcggacaaagctgccaagccccttaggagtgagggggtgggaaaataaatgataaagaaatgtagttcatgaagaacagaggaaaaccatagcgttcaacaaaataagtgaacgtgaatgaaaacaaggaaccgttcatagagaagaaaggaaagaacatggagaaaattttatttacttcagaatctgtaacagagggacatccggataaaatgtgcgatgcgatttccgatgcgatcttagatgaattaatgcgtcaggatcccatgagccgggttgcctgcgagacagccactaccacaggtcttgtgcttgtaatgggagagattacaacaaaggcttatgtggatatacagaagatcgtgagagacactgtgagagaaattggctacaccagaggaaaatatggatttgatgcggatacctgcggagtgatcacagccattgatgagcagtccacagatattgctatgggtgtggacaaggccttggaggccaaggaaaaccatatggatgacagtgaactggaggccatcggcgctggtgaccagggaatgatgttcggctatgcatccaatgagacagaggaatatatgccctacgcaatttccatggctcataagctggccagacagctcaccaagatcagaaaggatggaaccctgtcctatctcagaccagatggaaagactcaggtgacggtggaatataaccaagaaggaaaacccattcgtctggatgcagtggtgctctccactcagcatgacccggatgtgacccaggaacagatccataaggatattaaaaaatatgtctttgaccagataattcctgaggatatggtagatggggaaactaaattttatattaatcccacaggacgttttgtcattggcgggcctcacggggacagcggtcttacgggacggaagatcatcgtggacagttatggcggatatggacgtcacggcggcggtgcattttccggaaaagattgtacaaaggtagaccgttctgctgcctatgctgcccgttatgtggctaaaaatatggttgctgcaggacttgcagagaaatgtgagattcagctctcttatgcaataggagttgcacgtcccacttcaatcggtgtggagaccttcggaacaggaaaattggataacagcaagctggtggaaattatccgtgacaactttgaccttcgtcctgcagggatcattaaaatgctggatctgcgccgtccaatctacaagcagacagcagcttacggacattttggaaggaacgatctggatcttccatgggagagattggataaagttgagatcttaaagagatatttataaaaaaacgtgggggtgcctgggaattggcacctccatttttcatgaaatttatagaaagttaagagatagtttgagggctttatgatataatataaaaataaaagatcgaaagatgtaggagatgtgaaagtatgcgactgagaactcggattatcgttggatttcttatggtgatcttggttccccttcttttattcacagccactttatatgggttcagccagtcacaggccaggcatcagcagcagatcagtgaacagtcggacggcactgagcctaaatatgatatcgcaatttctcagtcggccaacagtacggcgaaaatccagcttatgacccaggatttgttcgcctccgcttttattattttagtttttaccgctttggcagtaggattatggatttataggagtgtagctgcaccgctggtgaaattaaaaaaagcgacccagaatatcaaagaaggaaacctggattttgtactggaagtagaagggacggatgaattttcggagctttgcagagactttgaggagatgcgcagaaggctcaaggagaatgcagaggagaagatactcctggataaggaaaacaaagagctgatcagcaatatatcccatgatctgaaaaccccgatcactgcagtgaaggggtatgtagagggaatcatggacggtgtggcagatacaccggagaagatggaacggtatgtgagaaccatttacaataagacaaatgagatggaccacctgatcaatgagctgaccttctattccaagattgataccaaccgaattccctataccttcagcaagctgaacgtggaagattattttaatgactgtgcggaggagcttggactggagatggagaccaggaatattgagctggtgtatgccaattatgtggacggagatgttatgatcatcgcagatggagagcagatccgccgtgtgattcataatctggtgagcaatgccattaaatacatggataaatccagagggatcatccagcttcgggtaaaggatgtgggtgattttattcaggtggaagtggaggataatggcaaagggatcgataccaaggatcttccctatatctttgaccggttttaccgtacagatgtttccaggaattcttccaagggcggaagcgggatcggactttccattgtaaagaaaatactggaggaccatggaggaaaggtctgggctaccagccgtaaggggatcggaaccataatgtactttgtactaagaaaataccaggaggtaccaataaatgagtaaaatactgattgttgaagatgaagaggcaattgctgatctggagaaagactatctggagctctctggatttgaagtggagattgccaacaggggagatgtgggacttaagaaagccctcacagaggaattcgacctgatcattctggatttgatgcttccagaggtggacgggtttgatatctgcagacaggtgaggcaggagaagaatactcccattattatggtatctgccaagaaggatgatatagataagatcaggggcctgggcctgggtgcggatgattatatgacaaagccttttagtcccagtgagctggtggccagagtgaaggcccacatggaacgctacaaccgccttattggttccaatgtggtaaaaaatgacattgtagagatcaggggaattaaaatagataaaacagccagaagggtttgggtaaatggggaagaaacatcctttactacaaaggagtttgacttgcttacctttctggcagaaaatcccaaccgggtatttaccaaggaagagctgttccgggaaatctgggatatggaatctgtgggggacattgccacagttacggtgcatattaagaagatcagagagaaaatcgagtttaatacagcaaagcctcagtatattgaaaccatctggggagtcggctatcgttttaaggtataataggtgtaagacccatcataaaaatgcccttcgccattttttcggacataagatgttcaatggaaaaattcaggtgaggggtatttttttctgttgtgtccgtattcagcaaaggaatcccatggtataatcttgaaataaatcaggcaggtaagataaggagaaagacaggtatggagctgaagaatttgtatgatcagttgaggatatatggagattcagattattatccctttcatatgccaggtcataaacgcaaccctggatgtatggcagatcaatttccgggggttgctctggatattacagaaatagacgggtttgacaaccttcattacccggaggggattttaagggaggcccaggagcgggcagccaggctttatggggtgaaagaaacctattattctgtaaacggaagtacggcggccctgctttctgccctatctgcctctgtaaaaaagggcggtaaaatccttatggccagaaattgtcacaaggcagtttaccatggggtgtatttaaggggccttacacctgtatatgtttatccacaatatgaggaagagtctggattaaacggaggaattcttcccagggatgtggataaccttctaaaagaaaatccggatatccaggcagtgatcctcacatcccctacctatgacggtgtggtctccaacatttctgctatcagcaggctggtacatgaccggggaatccccctgcttgtggacgaggcccatggagcacattttttattttctgagaaatttccagattctgcggctgcccttggggcagatctggtgatccacagtgttcataaaacccttccgtctctgacacagacagctttgctccaccgagttacagaccgggtggatccagagttgctcaggcgttatatgggaatttatcaaagcagcagtccctcctatctgcttatggcgtccatggatcaatgtatctgcacacttgcagcacgaggaagacaactctatgcttcttatattcctatgcttgagagtaccagggagagtctcttggattgccggtgcatgaagctgatagaccggtcctatgtgggacgccagggaatttttgatatggacatttcaaaaatcattttgtctctggcacactgtaaaataaatggtcatgagctacacaaaattttcagggaaaattatcatctggaaatggagatggaggcagagggatatgtgctggctttgagcagtgtaggtgatactgccaaggggctgaggcggcttaaggaagcagtgctggaaacagacagtctattggagcctgtggagaaggaaaagaacatgtgcgggtttcaaggctattgtgacaggatggttaaaataccctcggaggctatggatgagcccatggagagaattcccatggaggaagcggtggggaggatttccggggagtttgcctatctttatcctccgggaattcctctggtggtgccgggagaacgaattcctttacaattggtccaggatatgagaagatatctggaacagggcctggagctccagggcctgagtgatcacagcgcccaaacggtgtgtgtgctaaaataaagggccttttgggaaactggtgaaaggggaacctaaggaactgcagtcagaggagtattatgggaaagattttttatattatgggaaaaagtgcttccgggaaggacaagatctatggaagactggcaggagatgaagagctgagattaaaaaagctggttctgtatactacccgccccattcgtacagaagagaagaacggaaggcagtactactttgtggatgagacgatcttagagagatttcagagagagggacggctcattgagtctcgttcttatggtacggtgtatggaatctggacgtattttacagcagatgacggacaggtagatcttcaggaaggaaattatctgggaatcgggactttggagtcctatgagaaaatgaaaaagtattatggggactcctgtgtgtgtcctatatatattgaggtggaggatggggaacgtctggccagagccttaaaaagggaggggaagcagatgcatcccgcctatgaggaaatgtgccggagatttctggctgactgtgaggatttttctgaggaaaaaatcagggaagccgggatttccaaacggttccagaatgttgatctggaagaatgtgtgaaagaaattaaagaatatataaaatcctgggaatcttaacttttttctgtaaattaagatggttttatggtatacttaacaagtataaacagtagttcagccaaaggaaaacaggaaatctaaaatctcaggaggtgactcttatggttggttttcatacgatcatcggtcatgatgaagtgatacgacatttacagaatgcaatagcaacaggaaaggtttcgcattcttatattttttcaggggaccctggaagcggaaagaaactgttggccggaacatttgccatgacgcttcagtgtgaagaaaagggaaccgagccatgtgagaaatgtgattcctgtaagaaagcagtgggaaaaaaccatcccgacattattatggtccatcatgaaaaacctaataccatcagtattgaggagattcgtgagcaggtaatctcggatgtggcgatcaggccttactgcagtccttataaaatatatattataccagaggcagataaaatgactccacaggctcagaatgcacttttgaaaacaattgaggagccgccggagtatgcagtcatcattctgctcaccagcaatgcccaggccctgctttccaccatccagtccaggtgcatccgcctggatctgaagatcgttaatgatgatctggtgaagcagtatcttatggagcggcttcaggtgccggattatcaggcggagattgatgcatcctttgcccagggaagtattggaagagccagagaggtggctacctctgaggatttttcaaatttgacggagaatgccctgcgtattctcaagcatgcagatactatggaggtctatgagatggcggaggccattgaaggattgtcaaaggagaagcacagtattaatgattatcttgacattttccagttctggtttcgagatgtgctgatgtttaaggctaccagggaaattgataatttagtgtttaagcaggaaattaattatttaaaggaacaggcaagtgaacgctcctatgaaaacctggagcagattcttgaggcattggaaaagacacgggtacgtcttcgtgccaatgtaaactttgaccttgccatggagctgttgttcctgacgatcagggagaaataaaatgacgaaggttgtaggcgttagatttagaaatgtaggtaagatttattactttgaccccaaggattatgagattcacatgaacgaccatgtgatcgtggagacagccaggggtgtggagtatgggaaggtagttcttccgccaaaggaagtggaggagacggaggttgtatatcctttaaaagaagtgctccgggtggcttccaaggaggatggggagaaagaggcccagaaccgcattaaagaaaaggaagcgtttaagatttgtctgaagaagattcaggagcatggtcttcagatgaagcttatcgatgcagaatatacatttgacaataacaaggtgctgttttattttactgctgacggcagaattgactttaggcagcttgtaaaggacctggcatccatatttaagaccaggatcgagcttcgccagatcggtgtaagagatgagacaaagattttgggagggatcggaatctgcggccgggaactgtgctgccacacatatttatctgagtttgcgccggtttccattaaaatggcaaaggaacagaatctgtccctgaatcagacgaagatttccggtgtgtgcggccgtctcatgtgctgtctgaaaaatgagcaggagacctatgaagagctgaacaagaagcttcctggaaacggagatatggtgacaaccccggaagggcttcagggtactgtgcacagtgtgaatgtgcttcgccaaagggtgaaggtgattgtagaggtaaatgacgagaaggagattcaggagtttcctgtcagtgaattaaagttccgtcccagaaggaagaagatcaaactttctgaaaaggagctgaaggagctggaagctctggaggataaggatggaagatcaaagctggatgaatagcagactggtaaagtcaaaggagcgtgtggatgacctgctaaatggttactatattatccaggatccagagaaattctgctttggaatggatgcggtccttctctcaggctttgcaaaggtgagaaaagaggaacgagtgctggacatgggaaccggtacgggaattatccccatcctgctgtccgccaagacacctggtaagcattttacaggcctggagatccaacaggaatgtgtgagtatggcacagcgcagtgtggcttataacaagctggaagaccgggttgaaattgtccatggagatatcaaagaggctgctgaaaaattcggagcagcttcttttcatgtggtgacctgcaatccaccctatatgatcgggcagcatggccttcagaatccttatatgcccaaagcgatcgcccgccatgaggtcctgtgtactctggaggatgtgataagctctgctgctaaggtgcttgtgccccagggaaggttctttatggtgcacaggccctttcggctggcagagatcatgggcaccttgatgaagtataagcttgagcccaaacggatgcagctcgtttatccttatgtggaccgggaaccgaacatggtccttctggaggccagaaagggcggcaattccaggataactgtagaaaagcctctcatcgtgtatgaaaagccgggagtttacacccaggatatcctgagacagtatgatatgatttgaacctgataagaaaaggagggtggaagatgagcggaaccttatatttgtgtgcgactcccataggaaatctggaggatatcaccttgcgggtgctgcgcacattgaaggaagtggatattatagcggctgaggataccagaaacagcattaagctgctgaatcactttgacataaagactcctatgaccagctatcatgagtataacaaaatcgagaaggcccgtactcttattgaaaagatcaaggacgggcagaacattgcgttgatcacggatgcaggtactccgggaatttctgacccgggggaagagctggtgcgtatgtgttatgaagagggtgtgaaggtaacttcccttcccggccctgctgcctgtgtgacggctttgacattgtctgggctttctaccagaagatttgctttcgaagcctttcttcccatggagaaaaaggagagaaggcagatactggaggagatcaaggaggagtacaggaccattgttctgtatgaggccccacatcgtttgaaaaagacccttaaagagcttttagagaccttgggtgaccggaagttaaccctgtgccgggaattgacgaaaaagcatgaaacagccatggcaggtaccatttctcagatccttgccttttatgaagcagaggagccaagaggggaatgtgtgttggtcatccagggaaaaagccgggaacagtcaagagagcaggaccgccagtcctggctggagctttccatagaggagcatatggaatattatgagtctttgggaactgaccggaaagaggcaatgaaaaaagttgcaaaagacagaggtgtgggaaagagagagatttaccaatatctaatgaaaaaataagccggaagatgtggatgtatcccctgtctgtaagacagtagatcgttccatctccggcttttttatcttattatccatcagggatattcagttatgcattccttgcaggcttcctctttgctgcaggaaaaatattcaatggtatctgaaattctggagcaggttctctttttaaataaaattgtatgagttaccggtgtaccgtccttgggacaggttgtttcatagatttcttcaaattccatgatagatcacatccttttcatcagtataccacatattggataaagaaaaataaaaaaaagtgcaacatttccaaaacaatctcgtttataatggtgaagagaaaaatatattttaatcttatgatgaagggtaaatcgcctttgagtcatttcgcgaaagaataaggatatggaagatagagaaattgtagatttatattgggccagaaatgagcgggcaatctcggaaacagatgtgaagtacggcaactattgccgtagtattgtctaccatattttgcacgaccaggaggacactgaggaatgtatgaatgatacatacttaggggcttggaattctatgcccaaaaacaggccggaaaggctgcttccgtacctgggaaagattgctagaaacctggctctggaccgttatgattatcgcaaggccaagaaacggaacaatgaatttgatgtacttttaagtgaactggaggattgcctggcctctcaaaaaggggttgaggatgaatatgaggcaaaagaattaatgggttatatcaatgaatttctgtcagagcttcccagtgaaaagcgtattctttttgtacggcgctattggttttctgattctatagaggagctgtcaaaacggttttctatgagtgaaagcaaggttaagaccatactgttccgagtgagaaaaggtctgcggaaattcttagagaaaaaaggagtatatttatgaacaaagaggacttgtaccgtttattgggagaggtggatgaaaaattcatagaagaggcaaagaccgaaagaatctccacgaaaaaggtacgttggtttcctgctcttgcggcggcagcagtgctggtagtctgccttctcaccggcagttatgtgtggaggtatgttcaaggaccaagtgcacagggagatgtgaccttagccaggaacgaaaccggtgcggacagcctcaatgaggaacaggaaccagtttcctccaaggctggaaaatatacagaaaaaagtccggaagaaagttcttcagataaggagattgtaagtccggttgaaaagggaagcggtgatacacagataaacaatgcccaaggggagaatgaggtattgagtcagtatcaggatcagtcttctgcacaagaggtgcaggggatcacagaaaatacccagcagcagccggagaatcccattgagaacaacggaacggaaaatatgggaggaaatcagaatattcaggatggcaccggggaaatggaaccgggcagtacagaggaatccaatcccaatggtgagagggttcctgaggcggacagctattcggaaaacagtcaggctacagaccagggacagatcatccaggaggcacctatggctgtttcggatattttgacagggagtaccattaatttccaaaatattgcctacggctttggcggggaagcacaagcgcagcaggtaggacaggttctggggacaggaacggtcgtaaccactactggcgccagcataaatggttcggtgtatgagatggcgggaacggatagcagccagtcaattattgtgcaggcagacaatgacagcggttattatttctttagtgcggtatctccgtttcaggatggcagcttagaggcagtaaattagaatggtgatccgctcatctaaggctgggtcctactctgtaaatttattcaggccagttgaaaccaaggggagtgtaaattttcacgcagacagtcattggactgtctgttttttttgttacatagaaaagttcaaagaactttcctatgtaacaaaaactctgcgggggatgcacaaagctgccaagcctctcatgagtgaggggatggagagttgaagcgggcttgtgccctttgttacgtgaaaaggaacgatctgacctggagatttattctgggaaaggttcttttttagatttttgtatgctgttttaatatgacaccatataataagaaggttatttttaaaaaatccactctgaaaacgcatttttgatggaaaatacgtgggttttatggtacaataaaatacagttgggagctggctgccagcaatgaagaaatctggataaaagaacagcataagcttttcatagattagaataggaacaggaggaataacatgggcacagagaatacagaatatggagcggatcaaatccagattctggaagggttagaagccgtccggaaaaggcccggtatgtacattggaagtacatccagcagaggtctgcatcatcttgtatatgaaattgtggataatgcagtagacgaagcgatggccggatattgttcggaaatacaggtgacgatcaatccagacaactccatcactgtaatagacaacggcagagggattcccgtggggatcaatcataaagcagggattccggccgtggaagtcgtgtttaccattctccatgccggcggaaaattcggcggcggcggatataaggtttccggaggtcttcacggagtgggcgcgtccgtggtgaatgcactgtctgaatggctggaggtaaccatttataaagagggaaaggaatataagcagcgctatgaaaggggaaagacaatgtatcccctggaaatttccggaacctgttctccttcattgagcggaaccaaggtggaatttcttcctgataaagagatattcgaggaaacggtgtttgattatgacaccctgaagcagagactgcgtgagatggcctttttgactaagggtctgaagattcgtctcattgatgacagagaagagaagcatgaccgtaccttccactatgaaggtggaatcgtggaattcgtaaaatatttgaaccgcagtaaggagcctctctatccggagatcatctattgtgagggggagaaggacggtgttgtggtggaggtggccatgcagcacaatgactcctatacagagaacacctatgggtttgtgaataatatcaatactcctgagggaggaacccatattgtgggcttcagaaacgcccttaccaagacttttaatgagtatgccagaaagaataagatcttaaaggaaagtgagtccaatttaagcggtgacgatattcgtgagggacttactgcaattatcagtgttaagattgaaaatccccagtttgaaggacagaccaagcagaagctggggaacagtgaggccaggggagctgtagacagtgttgtgtccagtcagttggaaattttcctggagcagaatccatctgtggccaaatccactgtggaaaaatctgtgctggcccagagagccagggaagcggccagaaaggccagagatctcacaagaagaaagtccgccctggacggtatgtcccttccgggaaaactggcggactgttccgacaagaatccagagaattgtgaaatttatattgttgagggtgattctgcaggcgggtctgcgaaaacggcaagaaaccgctcgactcaggcaatcttgcctttgagaggaaagattttgaatgtggaaaaagcccgtcttgacaaaatttattctaataaagaaatcaaagccatgatcactgcttttggtactggtattcatgaagatttcgatatatccaagcttcgttatcacaagattatcattatgacggatgccgatgtggatggtgcccacattgcaaccttattattgacatttttgtaccgctttatgccagagcttattaaacagggatatgtgtaccttgcccagccgcctttgtataaggtggagagaaacaagaaggtatggtatgcctacgatgacgctgagctgaacacaattttagcggagatcggacgtgatggaaacaataagatccagaggtacaaaggtcttggagagatggatgcagatcagctctgggagacaaccatggacccggagaagaggattttattgagagtcaccatggatgaagaaaccatatcagaggttgatttgaccttcaccacccttatgggagataaggtggagcctcgccgggaatttattgaggaaaaagccaaatacgccaaactggacatttaagcaggagaatagagaatggaagataatatttttgataaagtccacgaggtggatctaaagaaaaccatggaagattcttacatcgactatgccatgagtgtaattgtatctcgtgcccttcctgatgtaagagacggactgaaaccggtgcagcgccgggttctgtattccatgatcgaactgaacaacggtccggataagccgcatcgtaaatgcgcccgtatcgttggtgatacaatgggtaaatatcatccccacggagacagctctatttatggaactctggtaaatatggcccaggaatggtccaccagataccctctggtagacggccatggcaacttcggttctgtagatggggatggggcggctgccatgcgttatacagaagcccgcctcagtaaaatatccatggagatgcttgctgatattaacaagaacacggtggactttgtgcccaactttgatgatacagagagagagccctcccttctgccagcacgttttcccaacctgctggtaaacgggggatccggcatcgcagtaggtatggcaaccaatatccctccccacaatcttagggaggttattaatgctgtagttaagatcattgacaatgttattgaggaagatagagagacggccattgaggagctattgggaatcatcaagggacctgattttcctacaggggccactattttggggaccagaggcattgaagaagcctaccgcacaggacgggggaaggttcgggtacgggctgtcactaatattgagactctgcccaatggaaaaagccggatcgtagtcacagagctgccctatatggtaaataaagcccgactcatcgaaaagatcgcagaactggtaagggataagaaaatagatggaatcacagacttaaatgaccattccaacagggaaggcatgagggtctgcattgatctgcgcaaggatgccaatgcaaatgtgatcttgaatcaattgtataaacatacgcagcttcaggatacttttggtgtgatcatgctggctttggttccaagcccaacgaagccagatgtattggagccaaaggtaatgactcttttggagatcctgaaccgttatcttgctcaccaggaggatgtggttaccagaaggacccaatatgatctgaataaggcccaggagcgtgcccatattttagaggggcttttaaaggctttggataatattgatgaggttatccggatcattagaggatccagaaatgtgcaggcggcaaaggatgaattgatcagccgttttgaactctcagatattcaagctcaagccattgtggatatgcgtctgcgtgcacttaccggtttggaaagagagaaactggaggcagagtatgcagagcttatggaaaaaattaaaaaatataaagcgatccttggggacaggaagcttcttcttcgggtgatcagagaagagatcgttgccataaaagataagtatggggatgagagaagaacttctataggatatgatgagtttgatatttccatggaggatttgatccccaatgaaaatacggttatcactatgacgaagcttggatatattaaacgcatgacagtggataatttccgcagccagaaccgtggaggcaagggaatcaagggaatgcagaccttggaggatgactttatagaagagcttctgatgacaaccacccatcattaccttatgttcttcacaaataccggacgtgtataccgtctgaaggcctacgagatcccggaagccagcagaacggccagaggcacagctattatcaatctgcttcagatgatgcctggagagaagatcacagcggtgatcccaattaatgaatttaagcagggcagatatcttatgatggccacaaaaaatggtattgtgaagaagacgcctatcattgattatgccaatgtgagaaaaacgggcctggcggctatttccctcagagaagatgatgagctaatcgaggtaaaatccacagacaataagaaggatattattcttgtaacaaaatacggacagtgtatccggtttaaggagacagacgttaggatcacaggaagaacgtccattggtgtgcggggaatgaatcttgttgaaggggatgaggttgttgccatgcagctgaattctcagggagattatcttctcatcgtatcagagtttggtatgggcaagagaacatccatgagtgaatttaccagtcagaaccgtggcggaaaaggtgtgaaatgctacaagatcacggaaaagacgggaaatgtggttggagctaaggctgtgaacagtgacaatgagattatgatgatcactacagagggaattattatccgcctgcagtgttccgatatctccagacttggaaggatcacttccggtgtgaaattgatcaatctctcagatggtgtagctgtagccagtgttgcaaaggtgagagaaaaggatgagtccaatcctattcttattcaggaagaggcagtacaggaggagcaagagataatttcagaggaagtggaagaagctgcccatgaagaggatgaggagcagtagaaatcaaatgggcggatattttatccgcccattcctttgaaaaaatcgtatggaggaaaaaccatgagaagcattcaggtaagtgaaattactgaaaatttaaaagaaatgtgtattgcggtaaatcatcaattgtcagaagatatgaagcagcggctggacaatgctgtgaaggaagaaaaatccccattggggcagcagattttaaatcagcttcaggaaaatcttcttattgccaaagaagagatgatccctatttgccaggatacaggtatggctgtggtatttctggaagtgggacaggatgttcacctggagggaggaagcgtggaggaggctgtccatgaaggggtgcgcagaggttatgtggatggatatctgagaaaatctgtggtgaaggatcctcttatccgtgaaaatacaaaagataataccccggcagtgattcattattccattgtacctggagatcaggtaaagatcactttggctccgaagggattcggcagtgaaaatatgagccggattttcatgttaaagccggctgagggaatcgagggtgtgaaaaaagcggttctcacagcagttaaagatgcggggccaaatgcctgtccgcccatggttgtgggagtggggattggaggaacctttgaaaagtgcgccctcatggcaaaacaagctctggcgaagccagttgatcagccttcacagatcccctatgtaagggagctggaggaagagcttttagacaagatcaataaactggggatcggtccggggggactgggcggaaccataacagctcttggtgtaaatatcaacacatatcctacacatattgcaggacttccggtagctgttaatatttgctgtcatgtaaatcgtcatattgtgagagttttataaggagaacagagggttatggatagaaaattgaaagcaccgctggataaagaagaaataaaaactctttgtgcaggagactatgtaaaaatcacaggtaccatctatacagccagagatgctgcacataaaagactttcccaggcattggacgagggaagaacgctgccggttgatctggacggaatcaccatttattacttaggaccgtcaccggcccgggaggggaaagttattggttccgcaggacccacaacctccagcagaatggataaatatacaccaagactattagacctgggtatggttggaatgattggaaaaggaaagaggacaaaagaagtacaggatgccattgtgcgaaatggggcagtttattttgctgcagtaggcggagcaggtgctcttctctcaaaatgtatcaaggcttcagaggtggtggcctatgaagatttgggcacagaggctatcagaaagctcacagtggaagagcttccggtaattgtagtcattgattctcagggaaataatctgtatgaaactgctgtgaaggagtggaaaaaagaatgaaacggattatcatgatggtgttgagaaatttattctatgttccttatggatggtttcaattgtgttattatgcatcacatgtggataaatatacagatgagcagcgttataaaatgctgaagggaatcgaccgtcatgccaataagggtggtaaaattaccattgatgttcatggaacggagaatattcctgataaagatggttttattttttatccaaaccaccagggactgtacgatgttttagctattcttgaagcctgccccagaccattttccgtggtggctaaaaaagaagttgccaatgtactttttttgaaacaggtatttgcctgtatgaaagcgtatattatggaccgtgaagatattaagcagtccatgcaggtgatcattaatgtttcaagagaagttcaggaagggaaaaactatctgatctttgcagagggaaccaggagtaagcttgggaaccagcttcttgattttaaaggtggaagctttaaggctgctatgaaggcgagatgccccatcgtacctattgcattgatcgattcctttaaatcttttgatacaaattccataaagccgttaactgtacaggtacattttttaaaacccatattatatgaagaatataagggaatgaagtctacggagatcgctgcagaagtaaaaagcaggattgaaactgttattgcacagaatctataataggtataatagaagttaaatccatagtgacacagaatttgaataacagtttttgtacaggatttatttatcagggggtccgtgctgttttttgtggctgttgaaatgacaggaggggctcccagtaacttgtttgtaattgtgatctatcctgtaaaaacatgtttgtgtacggtgttttaaggtcattattctttgagaaaaaaatataataaaaaaattgaaaaaaaccgttgacaaggtgtagagtttccattataattaacaatgcgcttcggaaaaaagcgtacatttgaactgcatacaaaatatgagttcggaatctggagaagtactcaagaggccgaagaggtgcccctgctaagggtataggtcgctaacgcggcgcgagggttcaaatccctccttctccgttttatcacaattgaaattgcaaaaaaacttaaaaaaagttgttgacaagcgatagagagtgtggtaagatacaaaagttgctgcaagaaagacaagcagtaacggcaacaaaaaaactttgaaaaaagttaaaaaagttcttgacaaacagaaaacagcgtgataaaatatcaaagctgtctgaaacaagaacagcagacaaccttgataactgaacagtgaaacacatacgattctcgaaaattctttaagaagatttcaaaaagaacaaattcgaaccaaacagtaatgaggattctaggatagctaacgttatcttgagaaatcaaactttatcagagagtttgatcctggctcaggatgaacgctggcggcgtgcttaacacatgcaagtcgaacggagatcagtttgacagagacttcggttgaagccgatctgatcttagtggcggacgggtgagtaacgcgtggggaacctgccctgtaccgggggataacacttagaaataggtgctaataccgcataagcgcacagcttcgcatggagcagtgtgaaaaactccggtggtacaggatggacccgcgtcagattaggtagttggtaaggtaacggcttaccaagccgacgatctgtagccggcctgagagggtgaacggccacattgggactgagacacggcccaaactcctacgggaggcagcagtggggaatattgcacaatgggggaaaccctgatgcagcgacgccgcgtgaaggaagaagtatctcggtatgtaaacttctatcagcagggaagaaagtgacggtacctgactaagaagccccggctaactacgtgccagcagccgcggtaatacgtagggggcaagcgttatccggatttactgggtgtaaagggagcgtagacggcggcgtaagtctgatgtgaaaggctggggctcaaccccgggactgcattggaaactacgcggctggagtgccggagaggtaagcggaattcctagtgtagcggtgaaatgcgtagatattaggaggaacaccagtggcgaaggcggcttactggacggtaactgacgttgaggctcgaaagcgtggggagcaaacaggattagataccctggtagtccacgccgtaaacgatgaatactaggtgtcgggtggcaaagccattcggtgccgcagcaaacgcaataagtattccacctggggagtacgttcgcaagaatgaaactcaaaggaattgacggggacccgcacaagcggtggagcatgtggtttaattcgaagcaacgcgaagaaccttaccaagtcttgacatccccctgacgtgtccgtaacggggcatttcctccgggacaggggagacaggtggtgcatggttgtcgtcagctcgtgtcgtgagatgttgggttaagtcccgcaacgagcgcaacccctatccttagtagccagcagtgagatgggaactctagggagactgccagggataacctggaggaaggcggggatgacgtcaaatcatcatgccccttatgatttgggctacacacgtgctacaatggcgtaaacaaagggaagcagccctgtgaaggtgagcaaatcccaaaaataacgtctcagttcggactgcagtctgcaactcgactgcacgaagctggaatcgctagtaatcgcggatcagaatgccgcggtgaatacgttcccgggtcttgtacacaccgcccgtcacaccatgggagtcagtaacgcccgaagtcagtgacccaaccgtcaaggagggagctgccgaaggcgggaccgataactggggtgaagtcgtaacaaggtagccgtatcggaaggtgcggctggatcacctcctttctaaggaagaagaagtagagtgttggagtgtttcactgttgagttatcaaatgtaagtgcgcctcggaagagaggaaaggcttacttagttaacgaaatatttctggtgccgatgcgtctgggggagacacccgttcccatcccgaacacgacggttaagacccggacggccgatggtactgcactggagacggtgtgggagagcaggtgggcgccagatcaaaaaagaaaaaaacaggtagaacctgatgagatagaacaggcagaaggaagttccgcgcagcggaacggctttcacactagacgcggcagtgccttgtcaagtgtttaatgccaacctccatcagcgggggagcgctgttacaataactggtcttaccagtgatcagagttcataaggaagacttgtggatcctgatgactgataaacatcagtcaatcctgtaccttgaaaactgcatacatgtaaaaaatctattctaaacgaatagatatccttgaaaaagagcatctggaagttattgaaagataacaaaaggatgcaaacgcaagataggaagacatcgaagacgaatctgcgagagcggaggagtcaaagatacaaaaaaatcagagaacgaaccgtatgttcctaacgctataggaacatagcaaaggtcaagcaataagggcacagggcggatgccttggcactaagagccgatgaaagacgtgataagctgcgaaaagcttcggggaggagcaaatatcccgtgatccggagatgtctgaatggggaaacccgtctgagaaaacctcagacatccatacgccaatccataacgtatggaagggaacccggggaactgaaacatctaagtacccggaggaaaagaaagaaaactcgattcccagagtagcggcgagcgaaatgggaggagcctaaaccggcgtgcgtgcatgccggggttacggactgcgattaagatccaggaaggttaacggaacggttttgggaaagccggccagagagggtgaaagccccgtacgtgaaaaccagagaggctgagcaggatccagagtaccacgagacacgtggaaccttgtgggaaatcagggggaccaccccctaaggctaaatactacttagtgaccgatagcgcatagtactgtgaaggaaaggtgaaaaggaccccgggaggggagtgaaagagaacctgaaaccctgtgtctacaagctgtggaacaccgttaagggtggaccgcgtactttttgtagaacggtccggcgagttacgcttactggcaaggttaagtccttaagggacggagccgtagggaaaccaagtctgaacagggccagagtcagtaagagtagacccgaaaccgggtgatctatccatgtccaggctgaagccgccgtaaaaggcgatggagggccgaacccacatccgttgaaaagggtggggatgaggtgtggataggggagaaattccaatcgaacccggagatagctggttctcctcgaaatagctttagggctagcctcggcagagattaacggaggtagagcactgaatttcctagggggcgtcaaagcctaccgaagaatatcaaactccgaatgccgtataatcgattgccgggagtcagactgcacgagataagttgggcagtcaaaagggaaagagcccagacctccagctaaggtccccaagtgcgtgttaagtggaaaaggatgtgggatctcccagacaaccaggatgttggctcagaagcagccatgcattcaaagagtgcgtaatagctcactggtcgagaggtcctgcgccgaaaatgtccggggctgaaacacgacaccgaagctgaggaatcagagatgattggtagaggagcattgcatgcggagagaagcagtaccgtgaggagctgtggactgcatggaagagagaatgccggaatgagtagcgagatagaggtgggaatcctctaggccgaatatccaaggtttccagagtaaagctgatctgctctgggtaagtcggggcctaaggcgagggcgtgagccgtagccgatggacaacaggtggagattcctgtactgcggtatgacagaactgtggggacacgtaaggagagcggaagccgggagtggaaagcccggcccaagcggggtaccagatgcaaaggaaaatccgtgtatcaatgggaagccgtgacggggagcgaaataaagtagcgaagaccgtgagccatgcgtcaagaaaagccgctatcgttcataccgtacccgtaccgtaaaccgacacaggtggatgaggagagaatcctaaggccggcggaagaagcattgtcaaggaactcggcaaaatgaccccgtaacttcgggagaaggggtgcctgggaaaccaggccgcagagaataggctcaagcaactgtttagcaaaaacacaggtctatgcgaaaccgaaaggtgaggtatatgggctgacgcctgcccggtgctggaaggttaaggggagaggttagcgcaagcgaagctttgaacttaagccccagtaaacggcggccgtaactataacggtcctaaggtagcgaaattccttgtcgggtaagttccgacccgcacgaaaggcgtaatgatttgagcgctgtctcgacaatgcatccggtgaaattgaagtaccagtgaagatgctggttacccgcgccaggacggaaagaccccatggagctttactccagcttggtactgggatccggtattgcatgtacaggataggtgggaggctgagaagcggtgacgccagttgccgtggagccggtgttgggataccacccttgcagtattgggtttctaaccagccgccgtgaaccggcggtgggacaatgccaggcggggagtttgactggggcggtcgcctccgaaagggtatcggaggcgctcaaaggttccctcagaatggacggaaaccattcggagagtgcaaaggcagaagggagcttgactgcgacaccgacgggtggagcaggtacgaaagtaggacttagtgatccggtggtattaagtgggaatgccatcgctcaacggataaaagctaccctggggataacaggcttatcactcccaagagttcacatcgacggagtggtttggcacctcgatgtcggctcatcgcatcctggggctgtagtaggtcccaagggttgggctgttcgcccattaaagcggtacgcgagctgggttcagaacgtcgtgagacagttcggtccctatccggcgtgggcgcaggatatctgagaggagctgtccttagtacgagaggaccgggatggacggaccgctggtgtaccggttagactgccaagtctacggccgggtagccaagtccggaagggataaacgctgaaggcatctaagcgtgaagcccccctcaagatgagatatcccattcttaggaagtaagaccccttgaagacgacgaggtagataggacagaggtggaagtgcagtgatgcatgtagctgactgttactaatcggtcgagggcttgaccaaaagaaaaagcccagggctagtaaccctggcgggaagttcaaagaaaaaaagcatgtatgcagttttgaaggtacagaccttcttagtacggcccagtggctcagttggttagagcgccgccctgtcacggcggaggtcgagagttcgagtctcttctgggtcgtttttaatatgggatcttagctcagctgggagagcatctgccttacaagcagagggtcataggttcgagccctataggtcccatttaaaaaaatatggatggattcccgagtggccaaagggggcagactgtaaatctgttggcaacgccttcgaaggttcgaatccttctccatccatttgccgtagggcacgccgatgtggctcaattggcagagcagctgatttgtaatcagcaggttatcggttcgagtccgatcatcggcttcaactaaatataataacgcggggtggagcagtctggaagctcgtcgggctcataacccgaaggtcataggttcaaatcctattcccgctacttatgcccagatagctcagttggtagagcagaggactgaaaatcctcgtgtcgctggttcgattccggctctgggcattttatggagcattagctcagttggtagagcacttgacttttaatcaagttgtccggggttcgaatccccgatgcttcattgatcgaatataccgcaaatccttataaatcaagggtttgctttttttatgtctgaagaaaacaggacaaaagttggcacagatggagagtaaatgtctcacttttgtctcacaaaatcagcgggttttccacggccaatgcggcattttccttttgcaggagaatatggttgttaacctcaatcactatcttctcggtatcacccaatagctccgcaatcattacggtcgatatggcgggtatgtggtagcaaaggttggtacagtagttatgcctaaacacatgcgccgtaagaccatcggactgggatactgccgcatccagacgcttgatgatctgggcccacatcttgttatagctgcttttggtcattaactgcctgccagcagtataaaacagctccggacgtttaagtccttggcaatatgactgcaggtacggcaggaccatagacgggatcgggaccgtgcgttccacctcatttttcgtgcccttgatataggaatcttgccgtcaaaggctacagcccgggatggtgactgtcttggcttttccagtctctgttggcacaggggccggtttttaagtatttgacatttctgtaagatttgctataatatacttaacaagacagccgacaggtaggtgcacactacccgtcccggcgaataagtttcaaactataaggaatagccgtctacttttctcaggagcaggacggctatttcttatttttcatgttcagaattccaacgattaaaagaccagtggtcaggataatcataaattcctcatatgtactcataaggcatctcctccttccacaagactcgaaacggatagagagctgccgcctgttcggctgcctgggtaaatatattgttaccgtcccctcagcttgtaatgcctgggggacggttattattaattatttatctgctaatttatcgtattgagcttttaattcatcatattgttttttgagctcttcatacatggttttatagtcgggtttttcttcagcaggaacctgtgttgataagtctaatgtacattcagagtattcatcatcgaaattaaacataggacccacttcaatgtctacgggggcgcttccggaaagttcataagactccgcatatctcaatgtggctcccggctttatttttgtactggaacttttgcagccttcgggttcataactactgtatgctgtgtctaattctatgccgtcttgataagcggtgatattaaactgaaaaagaggtgagcatgactcttcagtggagttttgatattctgcaattacatataggatattttcagtttctttcacttcgtatcctactatgtctataattccctctttagcctccatatgcgctaaagaatcggcgtaaacggtagctggtgaaatacttaaggccaatgttaatgataatgttattgtaaataaacgattctttttcatatattaatccccctttaatttttcggcattttcccgtaacctatgaaagataatatcatttcaataatgacaaacataaagtacattgggaataaaaccattgcaactgcataaagtatagcacctgtcaacgcaaatccacgttttttcataaaaagtcctagtgcattaaagatgacagcaagtacagttacaataagatgcggcataacaagtgccgttgcaaggccgctccctacttgctcagcggctgtctccccaacccctgcggcacctgaccagtagaatgcactgtatattaaatacaggacaccaataataaatgaaatcaatagtaatttactgagtttttactttcccataaaactccctcctttgtaattagtatttatattatacaatataaatctaattaacgcattaataaagtatattttagtacacgtattagaactttttcattcgtgcaacaccgaagctcggttcaaaacatatagcgtagttatctatgaccgtgcattttccgtatttggatttgtgacaatctattgcatcttgaagatattcttcaaaataattatggcatacggaaagcattttatttcaattctgagacaccccagtgtataagtaaagtattcaacgaagatagtcgccttaatcaccgtcttgtgagtaaaataataggatacttctatagtaacagatggaatatttattctgtttactttagaagtatcctatgactttgtatgcacgatacttaattcaaaatatttcatggatatatgaatattaaccagaaggacagctgtttattatttgaattaattcattggtcattgaaaatgtacacagatggaacagatctcattctttgttcctacccgcatattagggccccaggtaccggcaccggaggttacaatgttatgtaaatttcctttttttaagtatccgcaggaattttcccacatgatctgagtggtgaaatttccggggaggatctggcctgcgtgggtatggccgcataaatccaaatctcctccgcagtcagcaatctcctgaagctctttgggctggtggtccaggaagatgatgggttttgtatggtccagattctcaaccagcctatgggcgcttaagcgctgagatcccagtttttttgcacgtgagggatcctcacggcctaccagatagaattttccgtctatgagggtatggacatccttcagcatagtaatgcctgcatcttttaaaaatgtctccatctgcttgtctgatctttccttggggtttgaaaatgtaaagccggccaggatgggttcttccagatcatgatttccccagcaggcgtatactccatagcgggagtgaatggagcgcagtacatgtttcaaggcttggggagaacgaatggcatcaaattcattgtcgaaaaaatctcctgcgatacacactatatccggattctcccggttgatggcccgaaccagcttacgggcctgtttttctcccatgttatatccaaaatgagtgtctgccaaaaggacaattttcagggaatccatatttctaacggttttatgtatggtgatctcatagggtgttgtcacaagagatctggcgtttaagaaaccgtacaggctgaaggtgccgataatcagcgcgcacaggcctcctgccaggagaaaaactcctttggcacccatccaggatggatgaaagaagtatttcagtgccagacggatggcatctcctgctgatataaaaataagcagatataaaaaggttcccaaaaagtagttgctggtatgtttcaaaactctgtggagatcccttggttttcttataagaaaaccagtgagcaggcttgtagacaaaagaaagaagcataaccagtacaagccgcagaaaaggggagtctgaaatacagaatttatggttcccatccatctcaacatccaattggcaacataaaagttgatgacaatatagattggtgaaagtaacactgcaaccatggcaaaatcctttctaattcatcgatttcacattttataagaaacaaaggactccttcttaggataacctgggaggttcctcatctaggcttattatagcactttcccccaaaagtaaatataaattttcgataaattacatatattaagagtgatattggggcttcctgccgtgtgagcggcagcagaagattcatcaggtgatcgttatgaagcagaaggtttctctatttttatctttggcattggcaattttggttcttccctatttagcaatcacttttttgaatggtcctgcttcatgtatgtctattaaggaggcggacctggaggactgtcttatatggatggtgcggcttcagagagaggatggaatccagcaggaggccttaaaggcagagacggtggtggccaggtcaaatttttatgaggagattcaggcgggggccgacttggctgacatagcaagggagcttctggacaaggcaaaggaatgtgaaatttcttggattgagtcaggggaatgtgagaaaatctgcagagccattgatgagacaaaaggacaaatattgacaaaaaacggaagtgcctgtaaaatcccttatcatgcttgcagcagcggcaggactagaagcggcggagaggctttttttgatgaggactatagttatcttcaatccgtggacagccaggaggacagaaaggcgcccaattacctgactgcagtatttttgaataagacgcagtttcctgtggagatggagataaaaaagcaggacagtgcgggatatgtaacagaaatctgggtggatgggaaacttttgccaggggaagagttccggcaggagatggggctgccttccagtaatttttccattcaaaagctggacgaaacagtgagaattttgtgtaaaggccagggacacggggtaggctattcccagtatggaggaaatgcgctggccaagcggggggctgattatcttgaaattttaaatgtgtattttccagccctgagtgtggaagatcaccaggagtttttgaaaaaaatgtgaatagtctcacatattctggaaaccctataagtacagtaacagattacaaatagaggtgaaaggaatatgatgaaaaaaggaagaactacaagacttgttgtgaacggtgttctccttgctgcgatcgtggcattgggaattacagtattcagggcaggaactgccacagaggacacacagcctgttcagccaaagattgttggggatgaactggctttggcggaggaagatccggacaaggaaacacccatggttgacgccggaaccagtcatgtggaggcggatctgggagaaggaaacactcttgacacagtggatgctgccgacagcaatcatttatcagaaaatgaggctgcttccccggagacggcccagacagcgggaaccagtgtattggatgagcaggcggatagcgggcttatttcccaggtggattttactgagaatacattaatgcagtggcctgttgaaggaaatcttgtgatggattacagtatggataaaactatctattttcccactttggatcagtataaggtaagtccggcaattgggatcggcgtacaggagggaacacaggtggctgcagcagtggcaggtactgtgacagatatcagtgaaaatgaagagactggaaccactttgaccatggaccttggaaatggatacgaagcagtctatggacaactgcaggatctcacggtttctcaggggcagacagtaagtgcaggcacggttcttgggacagtgagcgctcctacaaaatattacagtgtggaaggaagcaatttatattttgcaatgagaaaggacaatgctccggtagaccctatcacataccttccttaaaatataagcggaagttctttcaatagatgagaggatttccgcttttttcggcgcacaaagctgtctggagtttggttttaaacctatgggaggggaagacaatcaaagaaaatgaaagtttcttttcacaaatttctttctatcacgtataataaagcaggtgggaaacagaaaatccgcagccggaactttcctacctgctttgtctattttagggactgcatgtccctgagttaagtgatgtactttgactgccggctgctttatgatagagaaggcggctgctgagctgtacagcgccggcagcagccttttacatagatggaaaaaatataggaagataggggataaagggagagaggccatgggatacagttatacttatatcttaagatgcagagatggtactttgtatactgggtggaccaatcatttggagaaacgggtagagaaccataacagcggaaaaggagccaagtataccaaggcaaaggggccggtaacactggcttattatgaaacctttgctacaaaggaggaggccatgaagagggaataccagatcaagcagctcactagggtggacaagctgaatctgatggagttttaagggcggcctggggatagctggatgattccaacagggattgtggaagagaaaacagggggattattatgttttacacaataattgacgatgtactgcactattatccgcacttgcttttactttttgtgctggtaaaaacattttcttttaaggaaggcagatttcagtggccgttgttctggggtgcttttcttcttttgtccctttgggactattgggttctgaatatgtacaagcatacagaaaataattttaattttacggtatacaggctgtttttagttgcagggtatcttttaaccgcttatctgtactctgtgatcgcattggagggctggaatctctataagcttaccttgatcattatgtggtggtttttctacggggctgccaggagcgtgatctttgcggtgacttccatgcttacctttaaggcagcaggggagatttggctgaatttattttataacaatctgtttcaaaccttgttctctcttcttctcattaaactccgggtgaattcctccattcggatttcccctgtaatctgctattgtgtcacaattttgtgttttggggtggaggagctgatcatttcttttgacaaagatttaggcagtctggcggaggcggggtatctctccaaggagcttggtatgtttttattcctcatagctattatggtttttgtttattggtgtatatccaggatgcttagacagatggaaaccctctctgttcaggaatatcaggccagacttcatggactggagctggattctgctaaggccctgtatgcccagaacagaaagtatacccatgacgtaaagaatcagatgatgacgatgtctatattaatgaaaagcaaaaactatgaggagctggagaatttctttcaggaataccaggaagagagcaagagaatggcatcccaggggaagtccagtggaaataccacattggatgcaattttatacagggaatctatgaaggcagcggaaaaaggaattcccataaaaataaacgcttctcttccggatttcataaacatatccagagttgacttcagtgcagttctgtttaattgtattgataatgcgctggaggccagcgaagggacagagcagccgttggtctgtgtacagatcacaaagaatcaaagctatatttttattaaaatcagcaaccgggtatgtgagaatattttggagaaaaatccctatctgcatactacaaaggaaaattctctgtaccatgggaatggagtgaaaattgtaaaaggcgttgtgaaaaaatatgacggggacatccagtatacccaggaggaggatttctttgtagtatctgtgatgctgcaggatgcggcaaaatagaatacctttagacagtccccaggaggacttcagagaataatttacaggcttccttctaaggggcaagttttttttaatgcatctacttgtcctcctggaaggaagcctgttcgtccgtttatttggtaaactggaagctgttaaattcgcagatttcctgctggccttcgccgtagaaaatgaagaatacagcgtgggtgccttcaatggagcttacgttggcgcttaactgggtgaattcctgggaggcttctcctggaatgtccaccagtgccagaggtgaattgtccggggaatctaaaatgacagccaccttgccggcttgtccttttggcatgatatccaggttcactgtgtaatttccagattcaaagttcagatacttcacacctgcaacagtgccgttggtaatattggtgattggattataatccggctcctcttcataaccggtggtgatataggcgccgttggtcaggtagcaggcgattccggcagaatatttttcggttcctgcaagtccctgtgtctcacagccctgggaagtcatctcagcctgtgtgatcacaagtttattgtcttccactgtaagatcaatgggctccatgcatgcttggcggctatagtcattgttattggtatgacgatgatagaatacataccattggccattgatctgttcaatgcctccatgaatatttccatcataataggttcttaaggttccagcataataatcctgggaagttcccagagcttctccgccgttatccataatgatcccaccgtaagtccagggacccatgggattgtcactgtaagcatactccaaaagtccacagtagccgttctgtgcgccgtgcatggtacttggaacatgttccgggtcattgatgtgctgggagcaatacacgtatacatacatgtcatcagctaccttgcgtatagaggagccttcatagaaattgtctaccttctcgccctctgtgttgagcatatccttggtttccagtacagtacacatatcttccggatccaggcggctgacagtggacgttccggccattcctccgttatataagtaaacctggccgtcatcatcacacaggacagcaggatcactggcatctaccttgccgcaggctgtgaagggacctgtgggcgagtcacttacaaagacattttcctccagagaagtatttccaatggggaaggaatacaggtagaagcgtccatctggtccctggcacagatccggggcaaaaagggcaccaaaggcatcttcaggcacctcacattccagaatcactccatggttggtccagtcggtcaggtcatccacaggggcagaccataccacgtaattgtttccacagaattttgtcttgttaatatcatgagatccatatacatatacccgctcctcaccggtttccgggtccgtgaatacgtggggctcgccatcaggtacatgctcccacagaggcatatagggattcatggcaaatacgtttgggcataaagaaaccgtcagtgcagccacggttcctgcagccagaagacattttgtaagctttttcaatttcatcttagttcctcctgaatttttaatgactttatttagttgtattcagggccctgaatttctttcttgtagaattcaatatagcacacaggattttttatagcaatatgacggaggcaacaggggattaaaatgtagtaattgggcattttgcaaatagataacggcgtgtataataggcagtagaggaagagattcagatccttaaagggattatggaaaaattagaagaatcataagagacgaaccatcaggtacaaagagggaggggacagaaggatggtgctgaatatagcggtgtgtgaggatgaagagattatctgcagatatttggcagagactatacagagatgttttcaggagaaaaattatatggtgcatatagacacttatcttgtccccaaggatttactcaaggctttggaaaagaagctgtatcatggctatttcctggatattgacatggggcagatgaatggaatacagctggcggggaagatcagggagatccatggcagccgtgaggcaggaattatttttgtgtccaacaaggaggaaatggtgtatgagaccttcaaggaatcccctcttcgttttatcaggaaaaagtattttcaggacgaaattcaggaggcagcagcagccttggcagatctttttcaaaaggaaagaaattcctttgtcattgaacagggcggaagaatcttatctgtacagatttcaggtatccgatatgtggaaagcctggaccgggtacagatcattcatacagaggaggagaattacagcatttactcaaagcttggccagattcaggagaatctggaggggtatggctttttgaggattcacaaatcctatctggtgaactggaaatatatctattccattggaaccaaggaggtgctgttggagaacggagagtcactgcctctgagtaagcacagggtgaaggaaatcaagcagagataccgtcaacttgcccaggaggcactttttaaaaataataaaaattgaccccacaaagaggcacatctccttgcagggtcaggaattataagaaaaagttttttaaatgggcatagttgccacaaagaaatacatgaggataaagtggcaggcacttcccagcattataaaaacatggaagatttcatgggaaccgaagttcttatggtgggaatcaaagatgggcagctttaatccgtagatgatgcctcccactgtgtagatgatacctccagccagaagccagccaaaaccggctctggggagagatttaaaaatcggcacaaaagccagtacacacagccagcccattccaatatatagaacagaggatacccattttggacaggtgatccaacaggctttgaaaacaatgcctaaaattgccatagcccaaacaccagcgcacaggaagtagcccaccttattgtgcagggcaatgagacagataggggtgtagcttcctgcgatcataatgaagatcatcatatgatccattttccgcaggcgccggtttatcttgtctgtggagtccacagaatggtaaagagtgcttgcagcatagagcaggatcatggtaagtataaaaatgctgatggcaacaacgtggatggtgtcagatcctctggctgtcttaatcagcagaggagaggcaccagcaattgccagcagcattgcaattccgtgtgtgatggcgcttcctgggtcctttaattttagtttcataaatcttgcctcctaaaaaataactaaaacttcgtaatgtagtatttaaaactacatgttaaatatattattactatagcatctttcaggaaaaaatcaagggtatattttaatttttattacataatgaaattaccaggaggtttcatagaacagctgaacacagaggatgagcggatattttgtctggtaattttccctatgggctcctcatatagactggattatggtatgatgatgacagcaattatgattgcggatttactaaaaggaggaacaacggatatgaatcctacattagactggctggaggacccggaggtatttgccgtgaaccgggaaaaggcccattcatcccacgtgttttatgaaagggaggaagacattacccagaaacctctgggatcttcaagacaatctttgaacggatcttgggatttttcctatgcagagaatccctccaaacgggagaaggatttctataaattggacagtgataccaaagggttcacaaagatccaagtaccaggtcacattcagatgcaggggtatgaccggtgccaatatgtgaatactcagtatccctgggacggaagggaggcccttcgtccgcccatggtgtcaagggagtataatcctgtgggcagctatgtgaaatactttgtcccggatccgtgccttaagggaaagagagtttatataagcttccagggagtggaaactgccctctatgtgtggctcaatgggaagtttgtgggttacggtgaggatgcctttactccatcagaatttgaggtgacagatcttctccgggatggagagaacaagctggctgtggaggtatataaaagaagcagtgccagttggattgaggatcaggatttctggcgtttctctggtattttcagagatgtgtatctctatgcagtgccgtctatgcatgtgcgggacctggaggttagggcaggacttgagaaagagtatactcagggacatttacaggtgtttggggagattcagggggagcaggagggtttttgttccctgattctgaaggatatgcatggaaaagaggtgtgcacagacagcaggaccattacccggggctgtgtggaatttgacgtttccttaggagatgttcaaccctggagtgcagagaccccttatttgtattccttggagctgcgtctctataacaaagaccgtgatctgaaggagatccttgtgcagcggacaggtttccgctcctttgagttaaaggatggaatcatgtgcctgaacggaaaaagaattttgttcaagggcgtgaaccgccatgaattcaattgccgaaggggcagggcggtgaccagggaggatatgctgtgggatatccgctttctgaagcagaatcagatcaatgcagtgcgcaccagccattatcccaaccagattatgtggtatgacctttgtgatgaatatggtatttatataatcgatgagacaaatctggagagccatgggtcttggcagaagatgggcaagtgcgacccctcctggaatgttcccggcagtgacagcaggtggaaggcctgtgttttggacagggcccagtccatgctggagcgggacaagaaccatccctgtgtgctgatctggtcagcgggaaatgagagctatgcaggggataacattgctgccatgtgtgcatatttccatgagagagacaacaccaggctggtgcattatgagggagtattctggaacagggactatgattccataacagatatggaaagccggatgtatgccaagccccaggagataagggagtacctggaaatggatggcaggaagccttacattagctgtgaatatatgcatgccatgggaaattcctgcggaggaatgagtctgtatacagagctggaggaatatcccggttatcagggcggctttatttgggattatattgatcagtccatacttgtgaaaaatgaacagggggaggaggttttcacttacggcggagactttggggagcggcccacggactatgaattctgtacaaacgggattgtctacggggaccggacgccttctccgaaggttcaggaggtaaaggccctttatactgacttgaagatcgctgttcaggatggaagggtgactcttagaaatgacagcctgttccaggatacgggatatttaaaattcctgttttctgtagagaaggaaggaaaggttctctctaaaacagagaaggaccttatagtaaggccaggggagaggacacaggtggattttgacctggagattccccaggaaccgggagaatatgtgtgtcaggtaagtgccgttcttaaggaagatacatcctgggcaaaagccggatatgagatttcctttggccaggaggtggtttttgtaacagagaaagcgtcccaagtcaaggaacctttgaaagaggaatggaaggttgtggaaggtgatgtgaatattggaatatacgggcataattacgaaattatgttttcaaagacagagggtggattagtttcccttgtgtatgaccaggaggaatacattaccaggaccccgaagatttcctattggcgggcaatgacggacaatgacagaggaagagggcagaatacccagatggcctgctggtatatggccggcttctgccagaggctgctcccggagaagttcattttcgaaaagggagaggaccaggtgaccattgggtacagctatgagattcccgcctcgccttcctttgtccatgagattctctatcatgtatacagggacggatccattcaagtgaccatatcctatccgggagtacaggggctgccccctatgcctgtatttgggatggactttaagcttcctggaagtcttgaagaattttcctattatggctgtggtcctgaggaaaattattgtgacaggaaagaaggagccaggctgggactgttccaggacagcgttgtggacaattatccgcagtatctggtgcctcaggagtgcggaaatcgtacaggtgtgcgctgggtgaagcttttgggaaaacaaggagggggaatcagcttccgtgcagtgagcagcccctttgagatgagtgtcctgccctacagtgccatggagctggaaaatgcaacccatcaggaagagctgcctcagtccaaatatacttgggtacggattctgcaggcccagatgggtgtgggaggagatgacagctggggagcgccggtacatgaacagtatctgctgttctcctcacagcccagaagtctgacctttaaaataaccaggatttgacaggagctagcccccgccaggtaagaagtttacctggcggggattttttattaccttaggaaggttcagtaatgcggcccccgcaggagaatccttccaggcaggattctttcctatatttttttctgtattcagagggggacatgttataaatttttttgaatattacataaaaattctgccgggagttaataccaatgagctggtcaatatcacccacgggggtgtcggagtacacaaggaagtatacagccttttccatgcgaaatctggtgagataattccagaggggcattcctgttttctctttaaatattttctggagatatactttatttagagagatgtggtcagcgatttcgtcaatattcttaatggagaagtagttgtaattgatgtagttttttacctgttccacataagtatccgcagggctgtattcatccgtatgaagctgaaggatttcaataagggcggtgttggtgagaacattaaggaaacagggatttttcttattgttggcttcattgcagatttgctgcagaagggggaagaggcttcttgcgtttttgatgaggatcccagtgtgcagcttttgaaaaaatgtatgaagcccaggataataatggaccagattggacagggggctcagtgagggataggaggaggtctggtaacagttgatgctcatattcacgcaggagtcaggagaaataagcttgtgaggcacgctgccattcacaagaagcaggttgcgctttgtgagattgaaaatctccccttggatgtcataatagcagcttccttccacaatataattgaattcaatggaacctgggggatgtacgtgataatccatatagtatttctgccagttcagataacagatctcttctggcagcagtacacgttgagagtccaggatttcataaaaatgcgtgtgcacaggcgcctcctttgtaaaatacagggttaaccggattctggaaaattttggttgtcaggtaatagaaaaataatgatttgttatatcaaaaaaattccgtgaaagtatataaaaagtgtatcccgtcaaatcaagactgtcaagaaaattatcgtaatgagttaaaaaccaaaatgtaataaataatagcttttgtaactttaaacatgccatttttggtagtagtaaagcctggacccagagtatataattcaaatcgtaaaatattttacgggacggcaaaaacgaaaattgtattggaggttaattatgaaaaagtatttaggagttgttttaacagcagtgatcacaggctctcttctgggagcggtgcccgcagcggcagatgaagggaccacattgacctacataacctggaatgaaaatcaaagggaccagattcaggcaaccattgacggctttaatgaaatatatccggatattcaggtggatctgcagatcactccctggaatgaatactggacaaagctggaggcttctgcaaccagcggaaatatggcagatattgtgaccatgcataccaatgtggtggcaaaatatgtaaaaggcggcaagcttgcacccctggatgatttaaaagaaatggacgacagctttgattatggcaattatccggaagggattaccaagctctatacctttgatgatgttccttatggtgtgccaaaggataaggactgtgtggttctcgtatataacaaagagcttttcgacaaaggaggagtggattatcccactgccaagtggacctgggacgatttaaaggcagcggcagaaaagcttacagataaagagaaaggtatttatggctttgctgcctacaatcatgaccaggaggcgtggggaaactttctctatcaaaatgggggaagcatcattgacgaggagaaacatgtatccggactggacaatcccaagtccattgatgccatggagtggtacatggatatgaatgaaaattattctccgtccaatgagatgatggcagaggtaaattatattgagctgttcgctacaggaaatgttgctatgcagacatttggcaactgggagttaagctattttacagaaaatgaactggtaaaagacaaatttgccatagcccagcttccagcaggaccggagggaattaaggctacccagatgaacggtctggcactgtctattccggcagactgcaaaaatatggacgcagccaagaagtttgttgcctatgccagctcccagaaggggatggaggactctataaacggaccggcgatcccggcatacaacggtgtagatgcaaaatgggcagaggcacacaaggatttatatgatacagatgccatcctgggaagcttggagtatggggtacagtttgtaggtacgcagaccaagacccagtggtctgaggtaatgtataattatgtggcaaaaatattcaatgatgagatggcagtaaaggatgcatttactcaggctgcaaaggaaattaatgagatacttgccacagagaaataggagaaaatgtctgagataaaagctggcaaaagggctgtctgtcaggaaggatttattttgacagaggccctttttcctgcatgggggtgtgggaacggtgatatttcagataacagggcacaagatatgggttacaatggtattgtttgcagagaatgcagatgggagcaaaaatgaagagaaagcataaaaactggctgtgggggtatttttttataggccctacaattattggattgttaatcttgaatatttatccgatcttcaagactgttctgttgagcttttcgaaaaacataggctttgaggagtatgtgcttaatggagcagccaattatttaagggtattccaggacagggaggtgtggatcggacttggtaatacactgctgttttccgcagtgtctgtaccgggaggtattttcatcagccttctcctggcatggcttatgagtaaaaaaatccggggcaccgggatttaccgggtgatttattttgcgcccatggtggcggctcctgcggcagtgaccatggtgtggtcctggctgtataattcagagtttggttttttgaaccagatcatccgcatgctgggaggtgagacccattcctggctgcatgatcccaggtacgcgcttatgtccgtgattatcatagccatttggggcggtctgggacaacagatcattattctcattgtggccattaccaatgtgccaaaagtatattatgaggcagcggagctggatggggccagcagctttgtaaaattgtttaagattacggtgccgctgatctcaccaagtgtatttttcctcatgatcactggctttatcggatcactaacgcagtttgatatgatttacatgctgtatgggcagaatacatccaaggctatggattcagtaaggaccatcatgtatcaatactaccgccaggccttcgtggttcaggataagccctatgcttctgccatatccattgtagccctttgtgtgattctggcgtttacgggaatccagtttgccgcacagaagaaaatggttcattatgactaggaggggacaagatgaaggataagagacaggtacatttatttactcatttaattttaatcatgggcggtcttatcatgttgtttccgtttatctggatgattctgtcctcctttaagaccgtgggagagcagatggccattcccatgcggatcctgccctcaagcttcggaaatatagaaaattttaaacaggcagttcaggcagttccttttcccagactgtatttaaatacaattctgatgatagccggacgagtactgtgtgctgtggtattttccagtatggcaggatatgggtttgcaagattggagtttccttttaaaaggcttttgtttgctttagtgcttatgcagatgatggttcccgggcagatttttattgtgcctcaatatatgatgctgtctaaaatcaatatgctaaataccgtgtttgccttgatctttcccgcactggtcagcgcctttggaacctttctgctgcgccagcagtatctgtccctgcctatggaattggaggaggcagcagtcttggacggatgcaatccctggcagacctttacaaaggttatggtgcccattacccggtccagcttggcctccctggccattttcacagctctttttgcctggaaggaccttatgtggcctcttattgcaaacaatgatctgaataaaatgccgctggctcccggacttaccgtgcttcagggaatctgcaacaataacaagggggctttgatggcgggaagtgtcatagccacagttcccatgctgattctgtatgccctgtgtcagaagcagtttatagagggcattgcccagacagggattaagggatagtaagacagatgaaggagagaaagaaatgttaaagattgtggaaaacaatattcacatgaatttagagttggaacaggggaaaggtgcaaggcttgtacatctgtcctgttatgaacaaaaggaggagatttcagataaggaatcccaggtatttaccctggctgaatttcaggccagcggctttaatcagaacgatcaccatggaatgaagcatacgggaagcagcccttctcttcttatggtttacacaggacatgaggactatgaaaatgagtatgggagaaagctggagatccatcaggcatatgaaggccttgagctcatcacacacattcagttttacaagggaatccgtgttatacgtatggaaaatgaactgctcaatcattcccagatggaatatgccatggaatatctgtcctccttcaccctgacaggcttggatgagaacggtaaaatgcccagggataaaagcggggttctctatattccccacaatacctggtttggagaagctcagtggaagagatataccttaaatgagctgggatatgatgcggtgaacagcttttccatgaagcggatgggggtgagcagtacaggaagctgggcctgccacgaatatcttcccatgggctgctattataataaggagctggataagtcggttacatggcagattgagaccagcggttcctggcattgggaggtcagtgacatttctggcagactgtatgtccaggcagcgggacctaccttccaggaaaatggtttcatgaaggtgttaaggccaggggatagcttcttgtctgtaccctgtgcggtgtctgtggctcggggagatttccaggaaacgattgtggagctcacaaagtaccggaggcggatccgcagaaagaatcaggataatgaaaagcttcctgtgatttttaatgattatatgaactgtcttatgggagatccaaccacacaggtgcttaagcctttgatcgatgcggccgcccaggcaggctgtgaatatttttgtgtggactgcggctggtattctgatggaaactggtgggacggcgtgggggaatggctgccaagccagaagcgttttccgggaggaatccaggaggtgattcagtacatccgtgacaaagggatgattcccggtctgtggcttgagctggaggtgatggggatcaactgtccgatggttgagaaggtgactgaggattggtttttccagagaaacgcaaggcccattattgatcactgcagataccagttagatttcagaaatcctaaagtacaggcatatgccagtgaagttatccgccgtctggtggaggactatggcgtgggttatattaagatggattacaacattgatgcgggagttggaacggattatcaggcagattcacctggtgaagggttgctggagcataccagggcttatctggcatggctggatggtattttccggaaatatccacagttaattattgaaaactgcagcagcggaggaatgcgcatggagtattccatgcttgcacgccaaagcattcagtctgtcacagaccagacggattatttaaaaatggctgccattgctgcaaactgtgccactgcatgtacaccagagcaggctgccatctggtcctatcctttagttgagggcacggaggaggaggcggttttcaatatggtaaacgcaatgctgttccgtattcatcaaagcggctatttgggacagattggccagaagcgtatggactatgtgacagagggaattgcctgttataaagaaatccgcagggatattgcagagggccttccccattggcctgccggtctggcttccatgtcccatgaatatatatgttatagtctggtgaatgaaggaagacaatatctggcggtgtggagagtggggggcggagaggacaaggcatatgaaatcccccttgataagctgcccggtgaagtgaaggaggtatcctgtctctatcccaagaaaaaggaaacccagtaccaggcaacagaaaaaacgcttacggtgagccttaagcctaatacggccagattattttttatccgccgggaggactatgtgagggaatgatgtggaaataagagagcagagcagccttgcatggaaaatgaagtattttctgggaggaacccgcctgggacattcgtattatttgtttttgctggtacataccttatttcttacctttaccagaattcccggtgtgtttattaacaccctgctgatgaatcaaactggagatgtgaattccaccttgttttacaatggttccatatttgccgcctgtgccattaccatgttattttctgcacaggtcatgcattggactggatgcagggttactgcggcaatggggattattgggtataatattttgtatttttgttatattctgtttcagtcttatgtgggaaattattacatgctttttgggatttttaatggaattgcggacggtttttattatatcagctatggaagtatgattttatcctacactactgtgaaaaacagggacagcggaatggggatcatcagtaccttcagtgcggttgtaaatttgtctgtgccatttttatcgggaagcataatttctcttattggcggcgaaaaggggtatgtgaccatttttgtgctggcgtttttggtggcttttctcacattaattgccgtatcccgtctctcagaggagagaaagaaacaggaatccagggtgagatatctttcttttgtgaagcttatgagaagaaaaccacagatactctacgggcttttgggtgagaccttgaaggggacacgggaaggtgcatttatgtttattttgaacataatcctctaccagcttgtaaaaaatgaatttttgatcggctgtaattccctgcttacaggacttgcttctattttgtccttttggtttatcagtcatttctttcatccggaaaatagaagaaaatttatgctgggggctgccgtacttctttctggggctgcggccttctgtctgaaggttttgaatccagcggtggtggtgggattttctatagtgaacggtttttttgccggaatgattgaaacctcctgttatacgaccttttttgatgtgtcccagagcgtggaggaaatagacgagttttctcctgagcttctggcttttcatgaggtttttgtggtcactggccggtgtgtgggattggcggcatttgcttttctgaacggtctgtccggatcctccctgaagggacagattttcagcctgttggttttgacagtgatacagtttggcactgtggctatgtgtaaggtggcagcagtggctgcagataaataaaggaaacccggtgtggaattttagacaaaaattctgcaccggattttttgtataaatgggaatatttagttgtggataaattgaatccagatattttgcaaaataaacagcaaaaaaacagagtaaatcataaaactatatactccttttttgacagccttcttatataataagaataatacttatggcttaggggggaatggctgtgaaaatcaggaataaaatattgcttgtaattctgggagttctgctgtccagcgggatcatcataacggttatttggtacagtaccagcacaaagcttaaggatacctatcttatggatatatcagagagcaccatgagggatgcctaccatgcctttgaatatttgcttacggatacttcttatatggcaaccatgatgtccttaaatgagaagaatattgttcagccggtgaaagagctgaatacgaagaagatcatggaaaataatcaatggaatctgaaatatctggagaacagcaggatcattacggatttcatacggagcatgaatgggtataagtattacattgtgggcacaacgatcatggtcacagaggaatgctccttttcctccaaccacctgatcctcaatgaggatgagatcataggaaagattaaggacttggaccaggagaagctgaagttcagcatggtgatgatggagcccatccacgtggagggaggaaagtccacgctgtccagtgattatgtggttcctgcggtgaggggaattctggatgaggacagagagattatggggtatgtggttctgtactttgactatggagtcattgaccggatgttttcctccaatttgccggagggaagctgttttcaggtggtgaatgagaacaattccattatttactccaactgcggagatgagccggatgtgatggaaaagctgggaagtggatatgtgcacaacggttttcgggcggataatgtgggctggacttttaacattgccattccctctgaattttatgtggccggaatccgccggactgtggcagccagtgcggtggcagtagggattatattcgttgttgcgggcttggtggctgtctttttcatatccagaatgactacggagattacggtgctcagagacaggatgcatcaagtgtccaagggagatctgacagtacgtcatgaaattaagggaagagatgaaattgcccagatggagcatacctttaatcatatgatcgtccacatccagaagcttatggacaaggttgcccaggaggagcggatgaagcggcttagtgagtttgcctttcttcaggcccagatcaacccacattttatttccaatgtgctgaacaacctggtgtggatggcaaaaattcaacatgcagacaatatggtgccccttatcaactctttgaatgcccttcttcaaaatgtgatgcaccaggagaaggacatgatccctctgcagacagagctggagtatgtaaaaaattatctgaccattgtggaatacagtggaagctatgattttcaggtggaggagagaattcaggagggaacagagcttctgtatattcccagatttattcttcagccaattgtagaaaatgccatccaccatgggcttcctcaggatctgtcaagggaaggggtaattaagatcagtacgaggctggaagaagaccggctgtatcttgtggtggaggataacggaccaggaatgacagaagaagaaatttcagatattatgactggaaaaatgaagccggcccagaccttcagcggaatcgggatcaccaatgtaaatgagcgcatccatttgttttttggggaagcatatggactttattatgaaagtgaattggggagctataccagagtggtattccggctgcctattgtaaaggaggagaagaatgtcaaagatcagacttgtattagtggatgacgagctcaccagccgtaacaccatgaaaaattatctggaacacaatgaaacttatgaaattaccgccgacttttccaatggcaaagcggccctggaatggcttcggaaaaacgatgtggacattcttctgtgtgacatgcagatgcctgaaatgaatggggtggagcttatgcggggggtacatatcatcaacgaatatcttcccatcattgccatcagcgggttcgacaactttgattatgtgaggggaagcctgatcaatggcgcggccaattatcttctgaagcatgagatcaccagggagagctttcttcaggtgctggaccaggtacgggagaagtacaggatcacccctgagggaaggaccgtaagccacaaatccggctattgtatccgggatgacaatgaatttgaagaaaagtggattcaggagatggtggaggagggaagaattgattttaactgccagaacgtgattcccattgctattgggccggactatcgttttcttgaaggcatcaagccttcagaatataaacatgacgtgtgtaaagctgtgattgatatgctgaaccagatacttcgggaaaagtataagtatttaatatattatacaaaagaggagcatttgctggtcctcatctcctttgtgagtgagtgcagtaccctgctgatgatcaatacagtaaataatcttatcaaccggctccaaagacagattgtgcgcatgattgacattaccgttaccatagcggcaggggaggtccattcccaggtgggcacggctgtccaggaggcacggtttctggacagccttctgaaggataagctgtatctgggaggaaaccggatcatctctgcctcagtggccaagaagcttgtttataccagagaggagctgccggaaaatttgtggaggcagtttcagtttgagattcaaaacagtcctgcaggctgtatcgaagtacttcatgatatctttgaaaccatggaaaagaaacggttttccagggaaatggtgtgcagcatctgttgtcagctcgtggatatacttcaggcatgtggttatatagaagaaaaagagaaggtagtgattcaggagcggcttggggaatatgagatttttgagaatttgtgcagtgaggtcctggagctttataatcagaagattcttctgcaaaaggggcaggagaagaattactccccggccatacgccaggcagttgattatatttacaaaaattgtacaaaggatatttccatggaggactgcgctgggctttcagggagcagttatacctatttcagcagggaatttaagaaggagacagggatgcgttttgtggaatttttgaaccatcagagggtgaataaggccaaaagcctgctcatccgtcagactgtccccatgaagaagatcgcggagctttctgggttccggaactacaattatttctttaaggtctttaaggaactggaaggggttacgcccagtgagtttctgtcaaaaaagtagagtaattcctaaaaaattgttatcttttttatggccgcctccggttatgatagacacataacggaggtgaccaatatgaataaaattggaaaaaaaaatgactggtgggcttatgtttatatcctgcccctgatgatcctgtcctttgccctggtatattactgtattattaatactgtggcagtgagttttacagactgggacggtatgacggatgctattaattttgtagggcttaagaactatgcatccatggtaaaggacaaaaccttctggacagcggtgatcaacaacgtgatcttcttttttggaaccgtatttgtccaggcggcggttggtttctttctggctgtgcttttgaaaagaaagctgccaggctccaatctgttcaaggcagtttactttatgcccatcgctatggcgacatctatcatcacagcaattttcaaaatcctcatggatcccactaacggagcgctgaataattttctgcgggcagtgcacctggatgcctttgctgtgagctggctgggcgacaagcggtatgctctgctggcagttatcatcgtgaatatattccagtggatgggtttttccatgatcacctactatgcaggtcttatggcactccctgatgatgtgtatgaggctgctaagatcgatggtgccggtttttggagaactacggtttctgttaccttccccatggtgaaaggcaccaccaatgtacttataattctgggtattgtgggttcactgaagacctttgacattgtaaaattgctcaccgccggggggcctggccggtctaccacagtgctgaatacctatttgtacgagaaagcttttaatgattttaatgcaggaggggcagcctccatcggtgtctctattttgatcattgccatgatcatgtcgttcctgcagatcaagctgggaaaggaggagtgaggttgtgaaaaagaaaataaaatcagcagttccttgttatgtggtatttgttctatgtgcctttatctggcttatgcctattgcaacagcactggtaaaatcttttaatattgaagggcttgggaactataagtacgtactttcttatgaaaagatcagttattttcgggtggttttcaacagcatgtttatagctgtgaccacagccgtgtcagtaacggtgatcactaccttggcaggctttgctttttcaaaaatgcagtttaaaggaaaaaagatcatctacggagcgatcctggcttgtctggcagtccccgtggcagctgtgaccagtcctttgtttgccactattaagaacttaaagatgctggatacccactggggagtgatcgttcccttggtggcatttaatgctcccatgatgctccttatgattaaaaattattttgataccatacctgatgagctgttggaaagtgccaggattgatggggcctccaccttccgtatctggtatgaattcatgattcctttaagtgttcccatgatcgcaaacgtgttggttctcacctttatttattcctggaatgactatctggtgcctctgctggtaatgcgcagcgaggagaactatacagtgactctggcagctcagtattttatgtccagtacctatcaaagtccagtggatgtggcaagaatatatgcagttatgatgcttctcacccttccatcaattattgtatatcttttcagtcagaagttccttgtgacagggatcacagcaggttccgtgaagggatgagtgcgtccaggaagatacaggatggatacataggttttatagaggagagatcaggaggatattgtaaatgaatgagaatttatattgtaatccggtaacttttggggatggaaaaagacatacaaacccggatccttttgtgctgagatggtgtggaagctattactgttatgcaacagatgagtggggcgtaaaggtgagccgctcacaggatctcatccattgggagtggctgggttatgctataaaggaaccggaatatcatcactactgggcgccctcggtgctgtaccaaaatggtgtgttttacatgtattactccaatattcccatagaggaagaggactgtcaccagcagcatctaaaggtggcagtgtctcaaagcccagagggagtatttcagtggaagaaaacgttttttgacgaattctccattgattcccatccagtgatgtggaatgggaagttgtatttattttactctgtaaataactggattggaacccaggagaagatagcaggaacctgtattttggtggatgagatgagaactcctctggaatttgccgggaatcccaggccggtggtcatgcccagcttaaagcaggagatttatgcagccaaccgttttcaggacggaagagactggtatactattgaaggggcttgtatggtagagaggggggaccgaagctggatgctgtactctgccaatgcctatgaaaatgtggattattttgtgggaacagcggtggcggaaaatcagcaggacctattaaagatgcagtggaagaaatatccggatgataccacctggatgcctcttataaagaaaaatgagctggtggaaggcacggggcataatacagtggccaaggcccctaacttaattgatgactggatcgtttaccatggaagaagtgcgctggaggagttaacgccaggtacagagcaaagagagatgcgggtggaccctttgtggtacagcgggcagcacatgttctgtgaggggcccacagcccaggaacaggaggggccagcccagcctcaggtaagacttgaggaacagagtattcataccaaaacccgcctgtgctcctgtcccaaatattatcatgcccagctgtggctctctggtaaaaaggaccatgtgggagtcagatatgggatttctcttgtttataaggatgaggagaattacctggagcttcaggtgaccacaggcagcagacaggttcaagtctggcagtgcatacaggggatctctatgctgctggaggaagcagagcttccaaagaattatgattataccgttccccacagcatctatattgaacgcacaggtgaaaatttccaggttcatttggatgaggaaaaattcctgcgttttacaggcagaggagagcttgcaggaagctccatagagattagaccttatttttcacaactgaaactacatagctttgttctcacccagcatgcctgtctctcaggagaaaatctgtacaggctgaaggatttttataaggtgtctaccagccaggctgggaacagggggcttacctcccgggaaggtgtgcttatccttcggggaacggcccgggaggaagcatatcaggaggaatttctgctctgccctttgggaaaagagaatggggtggtatttcgaaaggatggacaggaagtccttctcacccagggagagggagagctgttttccatcacccacagggtggggcaggaggaagaatggtttctggcagggaccaaaagacttccggcatttcaagcctgccacaaggactggtgttatgagctgaccaatctggaactggttgaataccggtatacaaaaatgtgaatcaattggcaaaaagttggagtaaaacttttttccttacatgatattcttaaactataaacaagaaaggcaggaggtaagcaagatgaaaaaagcaatgaaattcacggcactttttatggcggccgcaatggcaatgacaaccagcgtctggggggcggatgcagaggcaaaggaaccggttactttgaccttttggtcctggctgcccaccacggaccagtcagaggtaatgattgaggaatttgagaaggaaaacccggatattaagattgattatacccgtacggagcaggatgacttctttgaaaaactccaggttgccatggcttctggtacaggcccggatctgttcggaatgaccacaggggccaagatggcccagtatgcaaagctctctgaggatatgagagaagtggcagatacctactgggaaggctgggatggaaagatcaacgaaactgccattgaacagtgtaccacagaggatggaaagctggcaggaatgcctcttctggtggcaggaatgacagacatgctttacaacaaaaccttaatggatgaatgtggaattgaaaaggttcccaccacctatgaggaattgaaagatgctgcggccaaggcaaaagagcatggatatgtgtgcgtggcagtgggagcggcagatgactggatcaactctgatttatttgtacagctttccaatgaatttgaaaagggcgctgtatatgaggcagaagcaggagagagaaagtggacggatcagtgctttgtggataccatgcaggcatggcagaacctgtttaatgacggcattttcgaggacggcgctcttggggttgccacctatccggatgccagagaccagtatttctttgccagaaaatctatatttttcctcaccggttcctggcatttaggaccaacctctccaaataatgacgagattcagggtacagagatcgccaaccagaaggacgtgatcggaatgtctgtattcccgtctgtgtcagagagtggggaaatctacggaacctctggtgtggatgttatggtatgtatgaacaaggactgtgaagaaaaagaagcagctatgaaattcattgaattccttgccaacggccagggacagcagtactgggtaaaccagcttcagggcgcaccggtatccaatgaaatttcttatacaggagctgttgacggagagcttcagcagcagtccattgatgaagtaaacagctatgtaaccgatgcagcaggcaacagaaagcttggaaacagccagctggagacagctgttgtggttgccatgcagaatgtggcggcaggggcagatcccctgaaagagctggaaagtatccagagtgtggcagattctttatagaagcagcagattttttatctcaaaaataaataactaaaagtgcaaaggcacctaaaaacctcagctgtatgaaatacacggggtttgaaggtgcctttttgattgcatagggtagttgagagaactatcctatgcaatcaaaaccctccggggatgcacacaaagctgccaagccccttatgagtaagggaatgggaagttgaagagggcttgtccgctttgtttctgtggatttttgtccagcggactggtatcatggaaagtaagcgggaaagttggaagcaaagcacattctaaggaagggagcgtggcagccatgaaagctaaaaaaatattgaatatcctaatcctgtgtatcacaattttattgctggcaaatctgttttcgccctatatacaaatacagatatcggaatgcagagaagggccaggggcccatgtgtcggggattatcgagtacttattgggagaagaggttcattctgacggagtggtaagtatttctgcagttgggctggcacgtaatgtggaagttgttatggaagggctgaaggatgaaaagcttcttgtggtacaaaaattgttacaagattttcttgcggggccgcttatgatcctgctgctgcttttcctttatggcttctttattcttataaaaaggagatggaaatatcttatcctgtccgccggtgcactggccagtggaagtattctgctcctgggaccttttgtattggtacccagaagtattatttcttatataaactccctgttgttttttaatattccagacaaatatctgtctgttaaagatatgagcagactgatcctgcctgttatgggatggggctattgggtgtctgtcgtacttttatttttattgatgattctttcatttgtaagcttttttatatataaggatttataaggccttctatttaatttttctggaagttctgcataattttctctttcctacagatactatttccagaaacggatagtactgtaaacggaggaattttatatgaaagctacgggaatagtgagaaggatcgatgacctgggacgtgttgtgattcccaaggagatccgccggactcttcgcattaaggaaggaacccctctggaaatttttacggacagagagggagaagtgattttaaaaaagtattctcctattggagaattgagcatttttgcaagagaatatgccgaggctcttacccagacaaccggatttattgcctgcattacggaccatgaccaggtggttgcagcttccggcgccggctccaaagaatatctgggaaaagagatcagcagggagctggaggatgccatttccgccagggaaatctactgtgtaggtgtgagagacaagggcaagatccctattgtcagtgaccagaaggagggcatttatgcccaggccatagcaccgatcatctgtgccggtgatgtgatcggctctgtggttcttatgggaaaaacagagacggacaacgtgggtgacacagaaagaaaattggtgcagacggcggcaggttttctgggacggcagatggagcaataggtcctatgggccggaattgaggcagtgaaattcatccagggtcagaccggtgagagccagataggaggccacaggacaagtcacatagcggatatgccagggttcatagggatacccggttacattctctttcccctttggatagcggataatgaaaccgtacaggggagcatgcctggcaagccattttccctcatcggtaaggtcaaattcttgagaaagctccaggttcacagccggacaggacacatccagggccagtccagtctgatgctcactggtcccgggaggggccacatagccggaggtggattggcagaagagctcctcctggcgttggtaggagcggtatccggaaatcccgtagagcgttattttgtcctggcggcttcgttcaataagcctttcggcagcctgtgcggcttctttgcgaagaaggcgcttagggtcctggggcaggctgtcaaagggaatttcaaccgggatgagaccgggaggtatgtaatctctttgaagcggactggttttattaactaaaatcgtataatcgtcaatgacggacatggacaaaccccctttctttccagtatatgaaagaaagggggtttgtatgcctccagggcagttctttattcttcttccagggcctcccggccgaattcttccaaaagctcagacttaatattgtaaagcttcgcagaaaggtccacataaacctcgtgaggatgaacaagacggcgggattcatcccacagggtatccagctcctgacggcagtaggactgcagctccatgacagagggggaggaatagatgcgttttccctctttgatcacagggatcagaagctcccgcatggagtaggttccacccagaacctttgtctttttccaggtgtctatggggtcaaaaaggatcatatcctgagactcgtcatagacctcgtctgtgaggcagatcaggtctgctttgatctttccggttgtcttgctgtaaatacgatagaccgttttgtttccaggatttgtcaccttgtccgtactttctgagagcttgatcttgggagtaaaggtgtttgtttcaggatccaaaacagcagccagcttgtatacgccgccgaaggcagggttgtctgcggaggtgatcaggttggttcccaccccccaggagttgatcttggcatcctgggccttcaggctgtcgatcaggtattcatccaaatcgctggaggcggagatgatggcatcatcaaagccagcagcagccagcattttgtaggcttccttggatagataagccagatcgccgctgtctatgcggattccatacttggtaagcgcaataccttcttcccgcatctcttcaaagacacggatggcattgggaacaccggatttcagaacatcgtaggtgtccaccaaaagggtgcaggcatggggatacaatcgggcgtaggttttaaaggccgtatattcatcaggaaagctcatgatccagctatgggcatgggttcccagaacaggtacgtcaaacatctgtcccgtaagcacgttggaggttccgatacagccagctatgatggcagcccgggccccgaagattccggcatccggtccctgggcacggcgaaggccgaattccataacgccgtctccctttgctgcgtaaactacccgggatgctttggtggcaatgaggctctggtggttgatgatgtttaagatggcagtttccaccagctgcgcttccatgatgggtgccaccacttttactaatggttctcttggaaatactacagtgccttccggaattgcatagatgtcgccggtaaaatggaaattgttcaggtattccaggaaatcttcgtcaaagatgttcaggctcctgagataagtcacgtcctcttcagtaaagcgcagattttcgatatactcgatcatctgctccaagccggcagtaatggcgtagccgccattgcagggattatttctgtaaaacatatcaaaaataaccacttgatcggaattttccttaaaatatccctgcatcattgtcaattcgtaaaggtctgtgagcagcgtcagattatttgctctcataattgtactccttttaattttgctcccgtaaaaaatttggaagattcgtatagtttatttgttacattgtaccaagtcgctagcgcgacggctagcccaagttacaattcttccaccactttcttgaaataatatcaactttctaaaaataaaagtagcggtttgtttgtatatagtttattgttgaatcaccacaacacaactttaaacacatagaaacaacccgctatgtttaatttatcatgttttgactcattcaacaactacatatcctatttttttattcgtccgccgcctttttttgaaataatctttcctgttaccccattatttcacttttaaaggaggtcccttatggactatttttctatttttattcaaatgcttcaggccaaaggtctggcggacaacaccatccgttcctataaaacctatatcaagccatattttccatttctttcttcccgtggcatctcaccggaagatgcttcctggcaggatatgcgggattatctgtcatggatcaagctggaacgctgcctctgtgacagaaccatcaacatgatcatttcctatctgcagttctttcacgtatatgtgcttcataagccgtgggacagaacacaggttccttttcggaaatttaatgtttatcttccttttgtcccttccagaaaggaagtacagaccttcatttcttctctgcaagatcccaaagcgaggcttgcggtctcgatgctttatgccaccggtcttcgtttggatgaactttgtcatctcaagtgcagggacatcgtctcttcctccaaaaagatccatgtgtcggattccaaaaaccaccaggatcgttttgtccccatgcccggcctgatctggaagatgatcctttcctattatcacgaactcccaaaagaaatgaaacccagcacctggctttttacccagcagaattccatctgtaacccaatggataagcagtggctccagaaggtcattctgaatcaaagatccgctcttggaatgagtgataaacttactgctcattcattccggcatgcctacgcgacccacagttatgaaaacggaatggatctgctgaccttaaagacttttcttggacataagtctttgaattccaccgccatttatgtgcaccttgcagcctcttccatatcaaagaccacgaatccctttgaacagatcgggggtgggcttcttgggtaactataagatacaggacatctttggtttttcttatgaagatttctgtggccgcggtcacttccagtctgatgttcagcgtaaagctgcatccgccatcatcaaatgcaagagtggtgctcttggatgcaatgccagtcgatgcggtgattgtggtcatacagaacttcataataattcctgccgcaaccgcagctgcccgaactgtcaggcggtcctgaaagaagtctgggtggataaacgcagatccgaagtgatcgattcaccctattttcatgtggtctttacacttcctcatgagctgaatcccctcatttactgcaaccagaagcttctctatgctctgcttcataaatgctctgctgagaccctgctggagctctcggcggataaaggatatctcggtgcgacgcccgggatcatccaggtgcttcatacgtgggaccaggagcttctttatcacgtacatatgcactgcatcatttccggcggtggactcaccagggatggtaagatccaaaaatccaaaggaacgttttttatcccggtattcaaactccgtgataagttcaagggaaaatatatggctctccttgacgggtatcacaaggccgggaagcttgacttttccgcctcttgtaacgatcttcgtgatccctatgaatggaaggagttcaaagacactctttataaaaaagactggtgtccttacatcaaagaaacttttaacggttttggtaacgctattgaataccttggccgttacacacacagagttgctatctccaacagccgtattcaaaccgtgaacgatacaactgccactttttctgccagaggaaaacgtcccggagagtcccggcggtcgataacacttcaaaacgaagaatttatccgccgttttctcctgcatgtacttccttccggtttccagaagatacggtactatggattcctgaataaccgcacaaagaagaaaaagctggagctgatctttaagcttcagggatatcagagattcaagtcccgatataccggtatgacaatggcagaactgatccaggcagtctggaatgtaaatatccatgtctgcaggtgctgtggcagtatgaatatgaagccacttggaaggctgcatgtaccaatctcataagagcaggcatcctctactccatatctttttttcaggtcttccacaggaaggtctaataagcatgtccttttttatcagtcgaagcatatctgtctcttttatgcgcaatttcaccatgttcagtatctcatcgggtgtcaaaaagtgccaaagcaaaaccatacgatccccatagtgtattggctgtaagtccgcgaattggtacaattggaaatcatcagatttagagcaggaagatttttctggctctatttttttcagcactaaatcagatgctttccttaataattatatcacaagttttattaatgtaaattgcgaaaatttatgttataatgaaaaataatcacgagtgcgtagcaacgagtgattatttgcaactgattgaccgaaggtcaagcaggtaccgaaaggatatcacgagtgcgtagcaacgagtgattatttgcaactgattgaccgaaggtcaagcaggtaccgaaagggaaagtgcgagtacgcagcggtctgaaaaaaggtcgaaaaaaaattaaaaaaatttcaaaaaaggtcttgcattctggaaaggagtattgtataatacaccttgtcgtcagcgaggtgacaacataaagggctatcgccaaacggtaaggcaacggactctgactccgtcatttcaaggttcgaatccttgtagccctgtttcatgaacgagtttgcaggatgtatgcagactcgttttttttattacataggaaagttcttagaactttcctatgtaataaaaaccctccgggggatgcacacaatgtgccagggaaagctgcttcgcagctgcacattggcgcacaaagctaccaagcccctcatgagtgaggggatggggagttgaagcgggcttgtccgctttgtt

SEQ ID NO: 583 - DNA, 208025 bp, Blautia FBI02891
  source 1..208025: mol_type = genomic DNA
tctattatagcagttcctccagataaatcaataaaaacaaaaaaagcggccagaataagaattcatatcttactctggctactttactactttttcttgtattctatagaaagaaaatccaaatcatcataaacttcaaccaatttttttaggattagatagacaggatatatatctgtcgtaaatataaacttatcaaaaacatccgtttttctacaacatttaaagagaatgcgaaaaagtttattgctcctatagttttcgatcacactgtattgaaaaaagattttctcccagtataattccttatacaaaactggtaatagcttgtttccatcatatgcataataggtctaacagatcttcaatttcatccggtgcttttttaagaccatcatcagataaatttgaatcactgtcagtttttatcacctccccgttattgaacaaattttcttcagatgaagctgcttcttcataggtctgatctaacatttcagcttctggatcgtttttttcttcaggaaacggtatgttgctctcatctactatctcttcaaacccacgatctttgtcttggcctgaatcattctttgaatttttaagtaatgatatctcttgttttaaaacctcaatttccctttgctgttcttttaatgcaaggctcattgacaccatgtcacttgcaataaggtcccggcagctgcatttcgtcatgcgaagccgcacttccattgcagggtcaatactgcttcggatggattcccggagtgacgagaattcttccatcaaacgataaaggtgatcaatctccgttttttccagacattccatcaattgccgtatgtaatcctggtcattcaatatgacctttgaatcctggcaacaggcaagaacaatcagatctgtcagggtttccaataagctgtttaaaaagacctttatatttcctttttgaattacattttccagatcggcaagggtcttagctgtatcccaccccagtatgtcatttaagatccgaaagatgctgtctacttccgtgatgccaagcctttttttagttaaatctgacgtgatcctgccatcggagctggcaagcatttgttctagtatgccgagagcgtctctaagcgccccatttgatgcctttgcgatcaatttgagagaatcctcgtctgacgtcatttttaggtcatttaggacgtatttgaggcgttctatgatgacctggctactaatagaccgaaattcatatagttcacagcgacttataattgttggaggtattttatgcagctcggttgtgcaaagcaaaaatatgcagtattcgggcggttcctccagtgttttcaataaagcgtcgaaggcactggcagagaggttatgaacctcatctatgataaatattttttttggaagcgtaaccggctgataattagtctgggcaatcaggttccggatttcatcgacaccattgttcgatgcaccgtctagttctatgacatccattgatttgttttctaatatcatgcggcaattgtcacagacgttgcatggaccggagccggtcgggttctggcagttggcgccgcggcttaaaatcctggcaattgttgtttttccagttccccggtgacccgcaaacagataggcctgcgaaagtcttcctgtttccacctgctttgcaagtgtcagcaggttttgatcctggccgacaacatcgttaaaatcctttggtctataatcattatataacatagtctcctccttttatgcttcaacaaaaattcttacaagttcaaaaaaatcatttctggtgtaaccattccttcttttatggctgattaatgtctgtagtatcttataggtactgtctaaggtataaagaacgcttattcttgtaaagtcctgttttatggtttcaacaacaggcagccctaactttagttttaatatgctattaaagataaaaataaacagggacatgccctcttcccaatgatctgcatggcattcataaaaattcaatttgtctttttctttcagcaaatgcagaatcccataaaaatctgttttgcttgtgatatttaaaatatggctataagtatcttccagcattgaaaaggcatttgatatggagtcccagacataggggcagccatggcacagtccgctggccagcaaaagagatttctggcagcaccccttttgctttaggtaatttagcacgtgttcatctcccaccggtctaaaattcacatggtagcagcggcttaaaatagtctccagaggagatgcgccgttacatgtaaaaattactttattggtttgggactggtcttccaggagtttcaacagcatattttgtgcctgcactgtcatgttacctccatccaaaataacataggcttttactccggagtgtgatattcccactacagaacttttggataagactgcatggatgtcttccactttaatttgtgattgcccttcccctatcagcataaagtcactgttgtctttaaggtcatctgctttgcagtttaacaacgaagcagcaatactataagcggccattgtttttccaagtccagccgggccttcaagcagtataggcccagggttttttaactggagatattccattatattttgatatgctccatcatttcctaaaaatcttttttccatgtaccgtctcctattttgaaaagatgtatatataatttttcaaagtttcatcatagatacttccttgttcattttcgttttgattcaggaaatattccaatctacttatggaagtatttaacctgctggcagactgcagcaagagtccttccctaatcataggtttaacagaagaattttcatatgagcaacagattaaatgaaatagtaggttttgatcttcttctgatatatcaatcccgccgcttacaatacattgagcaagataagtaagcgtatgctccttcacatccaataatggagattctcttaacctttcagcttctggataaggcttcagtatttttataacgcccatcctgtgcagcagagacgcgctgatcagcagttccccatgatatggtattgaataatcagggtgaatgttgtaggcctccaggcatttcatcgccaggtacaccatgctggttgtactgatggtataaaccagaagccctccattataattgccatttttggttaaagaagcaggaagggtggagaatgtatccatgtcctggttaataacatattgcagcaggccatggtatcctttgttagtaaccatatctgtatactttataaataaggacttaaacttttcctgctcctcacatgaaatgccattaatatagtctgtctgctgataagtctctggtatggagagattggtgacaaacatcataagcttttcgtttgtgtcctgtgtcacgagccccctaaccactactaccctgcttttgtaatccatgtattcaggtacaatgttttcttcccatattttcgcatttatggtaccggtgcggtcaatcagcagtaagtctaaataaggtttgctgctttcagcactttctttttgaacaatgtctttaagataaaaaggttgctccattagttctgcataatgatttttcagatctgaaataaaaatctgtttttccatatatcctccctttaagttaattgtataaattcatgcagtatattctcgtaataattttttatcaataggtctaattcgtcagatacgggatacgcgaagtcatattccgtttcatgcattaataatgaactttctattttcaagattctactgaaataaatttctccgcatcttgcaaaaatttccacccggtggaaaaagtatttaagattatacttggattttccattcagtatttctctttgagctttgggaagttcgtgtaaatgctctcttatcgtagaacgatataactcaacgatctcatcaaatttaaaggataacgaaaggtcaccccattggtcgtccaacatatgcatatattcatgcagaaaagagcttgggctgcggatatcgacacacaatgtattgaatccggggtaatataggcccgccgctttatgtttccccaacttcctgatacgaagtattgcgtcagaaaaagataaatgatgaaataaccgttgatttaaactatcgaactcctgttcaatactatgaactgcagataaatctacatcttcatcaaactcgacatacccgaaataatcattaaatttagagtatttcatagcgttcagaatcctgtcaggtatatttttcttcgtcatataggctgtagcaatatgtttatttttgcgtcttgaatcataatcacgcaaattagatgacacctccaccatctcatgcaggatattaaaaataaaggtaatgattggagatgaagtattatagtagaaccttccgtgccacatttgaaaaaggattgatgcaggaatattctgcttctcatgcaataaaaggtaaagtgcatgataaatacttaaagggtgattaaagtcaagaaaatcatccaaggatttgattacgctgttttcaggtctttcataagttaaagtatccatgtttagagtaaatcccttttccaggagaatgttcaaatacccctgtggtgttaaacaattgccgactttccagttaaagtcaaaagccttattaaattcatgctgcgccttatgaatcactctgctatcgggagagttttcttttaaaatccgtatgactttgaaaatacaattcataaagcataaaatacttatgaagtcataagtatctactatcagagcttctcgatcaggtgatcttttataatgatagtaaccggattttttcttactggccggcatcaatggcccaaagaacctaagtttgtctttgatttcaaattgcaacgaatactcacttttaaatacgtcatttgacaggcagagttcataatggctaccatctttgggataggacagaataacctcatccttatagtctcctattagaccataaaaaaaagaaattcctttagtaatcgggaattcctctttcatgattgattttatttgactgttgatataacgcttcatcacttttataaaatagggctgccacccccagctgttttcgggcatcgacatgtagtttagctgcatggcaatatgctcgaatgactccagctgctttgtatacctgctttttttctgccttgctaaggttaggatgcgtacaccgttttgaagataatttgttgctgattcatccagacatgaatcggggggagcttctacatcggttatgccgcccaaaaaatccattaatgtcattaaatccaatttttctttcatcttgacctccttttaaataaaaaaaacaccttcatgtgaagatgctttaacctaaagtaatatgaatctattgtcctacctactgctaggaatttataaaatgaacgcatcaaaagatgcagctctaaagggataatatttctattagtataacaaaacccaataggtaattcaagttcatcctgtaaagaaagttcatcctgtgaagaaagttcatccttaacttaaggctttataaattccactttataaaaaatttccacccggtggaaattatgtctttttattcggaagtaaatgaatctatacacataaagataaaaagaatgcaggcaggtgtagcctgcctacattactctggtaatattgggtctgatcccaattttcaaaatatcatcaagccctttgccaaaaccaatgttccaatcagcaacgaatacctcaaagccgttattttttagtaactcaatcaggtagcgctcacattggagaactttaggattggtcgccttatcggcatcgtaggccacaactacagctttacagtgcctgttctttaagtagtctaccatgataatgccattacactgaggttcgacgagcttattataagaattgactcctggaacagagataacaggatgacctagcaaataatttgcaaggagagcctttttttctccctctgttatataccagatagaagcatcatcgacagatgattggtaaacagccaaatggctacctgaacggctgccgtttttcagagcattataatagttcccttgctcatctttttcttcatagtaggaagaaaaatttttatacttatttttgaccttacctttttgatcaactggcggatgatctaaacggagccgaagcctaaagagattggaatcagtgtcaaactgaggtattaatattccggagccgccggtaaaagtccaacgattatctttggttaaataaaagccggggacaccttttatacttccaaattcctggatcaattcctgcgttatttgttctctggacaacatatgaaagtatacgctgttccttgtgggtgatatagccggcatagaccgcacaagagaactttgaataagagtattgttccagccttcttttaaaagatattttttatgagggacatataaagccagtttttttagaaacgaacggtaaatggtatccaactggctattcggcagcgggggaatatataatatctgttgttgtttctttactatggtgtgcttcattggagcaggtctttttggctttcctttagattgagaaacgttatttgcaagtttccattgctcctgtgcataggcacgtaattccgcttcttcatataaacaggaggagtcccgcagctctttgacaaaaacgtatgtttttccgttaattgggctgatgatatcatttttgcatgttacccggcggcatacatgcagctgttcatctgggcaaaggggattggtcgcatcgaaaatagaacagtaatcctctttaccacaaatcgggcagggatctgtccgtgttacgttacgaaaatttccttccatttgcctcctttctgacaacagccaattgttggtgacaagtagtcagcaacagaaagagaagtttactgggtaacttctttaccatgaaggtagaatagataatttgaaaacaaaagctctcggcattaccataacgtctgaagacatataaaaataattatttcttaaactataatatagaataataaaactatcaaatttgtcataaaaaaaataagtatgaattgttaaggaaaaatccaaatattgtacttacgggaaactgtggtctgaactgagacaaaattccacccggtggaaagtatataaagataatgggtattagaaccatttggatagaaataaaatttccacccggtggaaatttttaacatatttgtgcgtttttccaccgggtggaaatgtaaataaaataaattcgcccggtaaaaaactttactcaaaacttgatttttattttaaatgccgtataataaaaaaagagaccaggataattaataaggagaagcgtcatggaaaatacagaattaaatagacaggaaaaatattatagggacgagctgctgaaacttcgtgacaaaagaagttgggacaacaaagaatggcatagggcgattgggattgatcagtctattttggactgtattgaaacaggagaaatgattcttaatccggaatcatacagagcactgaaagatttgacggaaaaatgtcagcagttagtcatgcttcgcttttcaaaacctagaattattgtgagttggatacacaaaggtggaacagggaaaagtacgttatccagtaatttatcttatgaactttcgcgaagagggtacaatgtgctggctatagatacagacagtcaagcggatatgacaagtgttctttatccagattatttggatgaaccaacaaagaatttttatgattcatttatcatgcatgatgattttaaaggatacataagcaaaacagagtatgataatttacatatcatatcaggctcagcaaaatccgaggatttagaaaagacccttgcaacaatgccggcaaatttaagaaataagatttttggaaagtgcttatccagtattatgaaagaaaattattatgattttataattgtggatatggataaatcagcaggtatgttaaatagggcaatcttggaaaaagcggattatattcttacacctttagaagcatccatcttttctttgaaagccttagtcaccatacagcaacaattagaaattgtgaaagatacaaatccaaaattgaagatgctggggatgttcttcaataaagttgacctgcgaaaaaaaggggttgccgaagctaaagaattagttgaggaattatttcctggttgtatgttaactaactttttaaaagcagaagcaaatatcgaaaactcgcagatggaacatatgccgcttgcagtatatgcgagaacctttggcaaatatactaaagctacgaaacagtttgtaaagcttacagacgagattatccaaaggattgcaaaactggaaatggaggaaaagtagatggcgggtaccagaaaatataaggctaataataaggagtttctgcaaagtctgacgaaaagcacaaaaagtgatatggagctagtcagcaaaaggcagcaaggttatcaggacattatagaaaggacaggtaaggaagaacagaagattgacttggagcagatggataatgcaccagatacatggaacttttttagcgagctgaaagttgaacagccctctaaatttgcagaattaaaaatgtccatttataataatggggtattgcagccgctaattctttggaagcaggaaaacggaaggtatatgatactcgctggccgcaaccgtagggatgcatccaaagacattattacggactgtcaggatgagcctggttttgacgagaagaagtttcgatatataaaatccattgtctatgatacagatgagatcactgaagaaaaggcacaggagatcatcattgacacgaattatgtacagagagagtatacccctaaaacaagggtactgattacgaaaaaaagaatggggatactggaaaaacagcgttatagcaaaggaaggagcatagagcagctggccaaggaaatgaaaattgaaaagtctgccatatatgataacctggccataggtcaaaaggtgatagaacctttccaggaactgtattttgaggggaaacttacgaaaaaagctgttttgaaatttacatattttgattttggcatgcaggaatggatgctggaaaacttttcagaacaaataacagacgcacgtgttaaacggctcatgaagtcaatgaagtcaaaggacgagatcagaaaggtgtttagcgatgatgacaaaggagcaaacttccggagaatagaagttagtgtacctgtaaatcgaatagaggagttccaaaaaatggtggaagattttttgaagagggcggaatagcaggtaaagttaaggtggaggaagcgagattgattaggagctgattagggttgatcctgccttgttatatgcccttggtattcctttaaaaaccatatgctaaatgtacaacagaatgctcacagcaaacggcgctatatccttacgggattacatagcgccgtttgctgtgagcattctgttgtatagaacattacccctttttctgcagtgaaatataaaaatcgccctggcagatgatgtctaaatatttactaataggaaatcgggattttttcccggaatatccagtgtgattcatataataattgaccatatccataatgtactcaatatcatccctctgatattcatagcaagaatgcagtatctgatctaacattgcgatggtgtcatctttgagatgataaaaccccgatttattgaggagtattctttctaacaatctaacaaattcgttatatttaaagtaatgcatccatccccctcctttaataataatataacatagatttagtatgtgttacattaaaattttataaaatataaaaaatactgtattttaaagggttttatgatgtgacacgttgtgttgtaacacaaactatgatatacttataaaataaatggatttttgtccagaccgtgacctgttccctgcagtttctgcttatttatgtttactgtaaaatattgggagagtatggagcatccggtcaatgatttaaacaaggctaaaatgatttaaacgacatttttctgaatcgaaggcgtctatttatttttaaaaagattggtgatatacttgggcatatacacctaagatatgagagagggaaatagcatggatgaaataaaagataataataaagaacagcaagaatctaaagacaaggaaagaagcagaagttatagatttaaaaataatacagtagaaacatttacaacaattgctaaagattttaatagccaggatgaggcaatgagggctttgatggaaacatatcaaagggaaaaaatgaaagaggaaatcccggaacgttcttctgaggtaagtaaatttcaggaatatctgggagttttgctgagccggtatgtttccagtgttaaagaagccaaaagtgcagatgagcgggcaaaagcggaggttagtgagttattgtcatcaaaagatgaggtaatcgtttcgcttcagcaaatgaacaaagagctgcaggacaaaatggagtttaatcaaaggtggcggaaagaagccgaggatgcggcggcccaggcaaaaagggaagtagaagagcagcttaagattgtaaaggggttaaacgcagaatacgatgacctggaaaagagaagccaggaaaccattaaagacaaagaaaaagtcatagatgtgctggggaaaaaagtagatgagatggagtcgaagatagcggattacagtaatctacttgcaaaaataaaagaactagaagaggcaggcagaaaaatggaaaaggatcttcaggaagctgaacggtctaagaaggatatggaatattctcataacatggaaatactaaaattggagagcagccatgaatgtgaaatatcaaaaataaacgcagagaaggaagcagcactaagagtggccggtgaagaagcacagaaggctttgaaagaattgagggcagaaaaagagcagcaaattcaggagaagcaggaaaaaattgatttgctgcagcaacgaattgaacgtctgattgagaataaaaatcagaagacggaagctatggatgactagcgggaacggtgaacacaagatttgataagtagagtgtgtaaggaagaatactctatgtgataagtgtaaaaaaagaatcgtgataatggtggcggtcttaattcagtcaagaccgccgttatttttcttctggaaaaataaaatttcactctcaaaattgcccggtgcgtttggggactgatatttatcctatacctcaatgggaattcttcaatatctgcaattctccttttttaagccggaaaatgacatcagcctctttcgccaattcattagaatgggtaacaattactacacatttgccctggacatgggcgctctctttgaggattctggcaatgtcctgtgcggtatcttcatccaggttgccggttggctcatcagccagaatcaccggagcgtcgcttgccagcgcacgggcgatcgccactcgctgctgctggccgccggagagattcagcacattacgcctggcctcttccctggttaatcccagccgttccaggactggaagagggggcaggctgctggtaagcgctacattttccagaggggtcagataatcaatcagattatatgcctgaaaaacaaaggatacatttttgcgcctgtgctctgccaggcctgtcctggatatatcctgccctttaaatagaatacggccgctgtttggacggtccagccctcccagcaaggagaggagcgtggttttgccgcatcctgatggtccgagaataacgtacatgttgccttgtttcaacacggcatcaatccctctcaaaatttttttcttgttgtcataggtatactgaacaccacaaatttccataatatgcataagttctacctcctttaatccatctgtgataagatatctttgggtttcattttcatgaccgggaaaatagcaagtattgtggctgcgctgcagagaaaaataccaatcgcccagaccaaaagataattcgccgcagaaatcgtgatatggacttctgttaaaacaatttcaggcttgttaccttcgttgctgcctttggccttttccttgtcccacgtaatgctgtgttcatattttggggcagcgcgggataataaagaattaccggctttttcggcaatcaacgaacttgtgccaaacgcgagcacaagtgacaggatggcaacagccaaaacttccgtaagctgctgtaacaggatcgcttttttggaaattcccatagccatcaaaacaccgatttcatgcaccctgttttgcagccggaacgtaaggagcaatgcaagaataagaaagcaaatgcctgtgataactgccattgcaacacgtatcatattctggagagcctccagggcttcctttgcgttctgataatccttatcatattttgtaatcgtgcatttttgccagtcaatgcctggaatctgttttacagaatctatcattgcgtccaatgcctccgggtcactcacataaaaatcaccatattgacagtgtccggatttgccatatagcaatttggagcaagtggaaatatctgtgaacaccacgttttcatataggtcataggatggagccattccggaagaatcctggtccttagtgtttttaaaaatcccctgcacggtcacttggattcgttggctgcggtttaccagactgcccaactcaaagatatctccgacagacagaccattgcgtctggaaaaagtttcatggatcagcacgacattctctgtgtctggtgtgattgcagttccttccattatttcaaagcctgcctcagtaaagtaggtgtcctgcccggaataactgttggcaacaatttttccggcgtgttcatatccctccggcacagaagccgctccttttgtttcgatttccatcggatttcccttaacgtcccaaaaagaggcctgcgtataggagcgcagtgcatagctgccgctttgaccgtctatggataggagctgtcgaatggtatgctctgttaatccgtcctccgccatttttgcattgacggtaaaactgcccatcaatgattttcgtacattagacgcggcgtctttggccgcagagtgaagggataagcaggtcagcatcatagtcgccatcaccagtaaaaaaaccagcagggaaacggttttccctttcttccggagcagatacaggccagcccgttttagttcttccatatctgcacctcattccattcttgataagattgctttcggctgataacgcatgacagggatacaggtaataagcgtggaaaataccaaaagcacactcccggcaatcgtgacaagcataaaatactgagatgtaacctgtacgcctccggcagtttttccaaagagaccatttaaatatccggaaatactccgggcgaacaggtatgccgctgggaaagtgacaactccaatcaacagggtttccattacatactgaaaaagaattgctggctttgtgatgcccacagcaagcaggattccgatttccctgatgcggctgcgctgccacatggaaagaaccagtattatgaccgcagcactgacggcagttaccaatacaataaacaggaaaaacaaagagtccatatccgaaacagaatctgctacgcgctcatatacctcatcattggccgagatgataaaatgatcccagtttacagagcggatattcagagctttctgtataatggtttcaagctgttccgggtccgatacgaagaaatcggcagaagagtagccaacatcagagtaattcttaagtaattctttcatggcgccttccccgacaaatgcatagttggcgtagtcgtaataggatgcttcgttgtaattgtttttttcatctgttttatccgcgacaatttgaaacaatcccacaatctccaattccaaagttttatcgttggaagaaggattattgactgccaaaataggatctcctattttcagatgatgtttattcgccatatcctcactgatgaggatgccatttttactatccgggtcaatcgcagtcccttcaatcaatgtcagtgcgcctgaaagaaacagggagttatattcagagttgatacagccataagaatagaattgacaatccacatttgcgtagccggttggctctaactgctccatccactttccatctccgtccgccaaactcaaaatggtacggaccgaggcattataacctttgattccgtcaatattgccaatgtttttcagcatttcgtcagagagaaattcctgtgtgctgtaagaaccgcctgtaccgctggaccagccgccggtggaaacattccggctgacggaaaagctgacgccggttgttccccggagttctttggactgcgcttcctgtgcgtcggagatcgccagccccgaaagaaccagcgatgaggcagcaaagatgataaaaaagatgataaggctttttttccatttccgggtaatgtataaaactgcccgttttattgtgttcatagtgttacctcctgtagttgataagaggatcatacaggagaaacatggagcccgggtgtagtttggaagtattttggatatagtgtaagccggacactccaagtctggcggtccggcttctgtttttgatcatgagaaatatatggtgaaacatacaccaacatttgtatttttaatttcatactgcagatgatgacgttctaaaatggtctttacaatatacaatcctaatccactgcctccggtatctctgtgtcgggaatggtcggcccggtagaaaggctcaaagatctgtgttaagtccgcagcgctgacggacacaccgctgttctccatgcgcaggatgccatccttgaatgataccgttattactgcccgcttaggagagtgaaggacggcattgccgatgatgttggaaatggccttttgcagcaaagcggcgtctccctgaaatagaacacaatcgtcagcctccaccaaaaggctttgttccttatcctctgaagcgccctgccatttccagcagcaattgcggatcagccgggacaggtcgaaatcggacactgtcaggctgaaatctgttccggccaggcgggatgcggagaggatttcttttaccagcagttccatttcattgacggtacgcatagacagccggagatgggtatcccggtctttatattcgccgactttacatatcatcccttccaattcaccttttaatatggtgatgggtgttttcagttcatgggaaacagaacggaaaaaatccacacgctgcttttcctgctgccgttccagatcaatatctgcctgcagcttttcattggcggcagtcagctcatttaaggcgctgtccagccgtgctgccatgatgttgaggttggcggccagcgttcctatttcatccgtgcgcacggtgtcgcagcgccatgtcatatccagggcagtcaggcgcctggagatatggctgatttccagaaccggcttcgtcagggcccgtgacacaaagtaagccgcgacgagggaaatggacagaatcatgacgctgatcacaggcaggagcctccaaaaggtttgggtaatctgatttaccattttgcccggcagcgtgacagataaggtgtaggttccctctttcaggttcaagacagcagtggcggtttgggcaggattctcttcgtttttttcatgttcactgccaaaagataagctgtcgccgttgccttccagcttggcagaagcgctgtatgcaaaggaaaaatcagacagccggtctgtggctgtttccagggtaccgccctccagctctgccacaagcctgctgacttgtcggttgtaatcggaagacacaagagatctgtagctgtagggcataaccgccatcacgatgccatagagcaggaagctgaccacaaatagcagcagtgtgagcagcaaaaagattttcagccataggctgctcttaattttctttatcaatcctgtatcccacccctctgatcgtttcaatgcagtccacgcccagctttcggcggatatttttgatatgggtgttgatgattttatcatctccgacataatcgtaattccatatcctgtccatcagccgttcccgcgtaaacacccggcctttattttccaggaagagccggaggatttcaaactcgcgggcagtcagaatgacctcatccccggaaacatagaccttataattttctgtgtcaagctggatttcccggtgggacaggaaacgtcccgaatccccattttctgttgtgcggcgcaataccgcctcaatccgacggagcaataggggcatggaaaagggctttgtaatgtagtcgtcggctaacaggtcaaatcccttcatctgactttcttcatcgtccagcgcggtaagcagaatcaccggcgtgccgctttcatggcggatcatctcacagacggtatagccgtccagtttcggcatcataatgtccagcaataccaaatcgattctttctttgtgaaaggccgcaatcccctccatgccgtcttgcgcagtcaaaactcggtagccggcatcttctaaaaaggcttttaatatattctgtatggattcttcatcctcaatgactaaaatagacttatgcactgacagcacctcctgcggaaaagtatagcacagaagtgtggagttttgatggagtccctacatgtttttctatatcatagttattctgcagaactgttcatatcattcatttttgctcctgaaggctataaaaagggcggactctaatcctgaatgtaaggttgacattacattttacagagagtatactgaaagtaaggtaaacattacagaaaggaattgcaccatgaaaaacagaatcagggaattaagagagcatagggggctgacacaagagcagctgggagaaatggtgggaacctccagacaggcaattatcgccatagaaacagagaaatttgaaccttcgatctggcttgcctacgacatttcacaggtatttgggtgttctatcgaagatgtttttttatttgaagaaagtacaagaaaatcgcgtgcggacagccgcaggagggatacaaatggcaataaggaaccttcggtataagggtgacattatgttgcgtaaaaggtgtaaggaagttacacagattgatgataagataaggcagattcttgaggatatgatggatacccttcataatacggaatgcggcgctgcattggcggcaaatcaagttggaatcctgagacggcttgttgtaatagactactgcgggtatacactgaaactggtcaatccacaaataataggttccagtggtgtccaggaatgtatagagggatgtctcagctttcccaatcaatttgtgaaaaccattcgtccccagaaagtcacggttcaggcatggaacgaaaagggtgaagaaatcatcgtgacaggggaagatgagatggctaaatgcttctgccatgagttagaacatttagatggagagatttttttagataaggcaattgaggaggcagagcaggagctatagcaaagccatctgacaagacaacggtttagtaaaataagagataatagccatagtttaactacggtattatctcttattagacttttagtgctctgtaaaaagcctttttttcaatgaggcaatccatgtttcgatggattgagccaatatatactgctgatgtaaaacagccatgcctgtttctgggatatccggggcgtcatctttttccttgatgttttcctcaagatatgcttttaaggtttttacattgtcctcaatttttttcaggcaagagatttgttctagaccgcatggcttataaaaacaccactaaaggaaccgatggcaatattcagtaagcgattcagccttatgagcagattgatttttttctcgttcatggcaacttacccccataaatgtaaactgtagacaaggtagccagcacctccttatacagcagtgtattgatcggagcagttctgattctttgctccatcattttcttaaagccgatcttaaggcagcttggagcaatcgaaagtgttatgccttatgcaagggattgaacggtattctatacgcacagcccattgctgacgatttttccgccgctgttactgcatttatggctgtccgtcttgacaaagaattatctgtaacaaaagcaaatttccatgctggcagcgcaagctgatttatcgggcgctaacaggaggatgcaggggtattctctcttattttttataaaatacacggttgtaacctttttcggacatttctctgttatactatgaaaaaaacaaaaaggaatgaaatcatgaagcagattttaattgttgaggacgacagcctgttaaataaaaccctggcctataatttgaccctggacggttatggaatcacatcttccctgaatgccaagaccgccgccggggccttgaatacaaagaaatttgatctggtccttctggacatcaatctgcctgatgggaacggttatgaattatgcaggctgataaagccggagcacccggataccatggttatctttctgactgcaaacgaccaggaagccgatcagataaaggggtatgagctgggggcggtagactatatcacaaagcctttctcgattgaggccctgcagcggaaaatccaggccatgttccgtatgctggaacgtcattaccctccaagggatattttcgatgacggcaggctcttccttgatttttccgggctgacggcaagtttaaacggaaaggaactaagcctttcccccatggaattcaaaatgctgaatctgttccggacaaatccaaagcaggttcttaccaggcagcagctcctggagaagctctgggatatcgatgaaaggtatgtggacgagcataccctgactacttctatcagccgcatccgcagcaaaatagaagcgggcgggacggtttatattaagacaatctacggcatgggatacttatggacaggaggcagtcagccatgaaggaaaaagagattaccgtaaagcgtttattttgggggatggcggctggcatgtttttatccatggcagtcataaccgtctttataaccctgctgactgacagtctgcctgttctcctgtgcggagctgcattgacagtctgcgcacttatgtggctgtttttgctgacgcggggattggaaagggacctttttctcttttccaccgatttgtgcaggacgctggacagcatgttagacggctgctccctgcagcggcgggagagtgactctgaaacactgcttgcccgtatccgccatcgtctggcccatctgtatcggattatggaggaaaaccgccgcaaagtggaggaagagagaaaagaactgcagtccattgtatcggatatttcccatcagattaaaatgcctgtgagcaaccttaaaatggtaacggacacgctcttatcgagaaatgtcacagaacaggaacggcaggagttcctgcggggcatccgaagccagacggagaaactggattttctgtttcaggcgctggtcaaaacttcccgtttagagacaggaattattcagatgaaaaaagagaacggctctctgtatgatacggtggcgcatgccatgggcggaatcgtatatgaagcggaggaaaaggagatttgtgttgccgtgaactgcccggaggatctgtatctgtgccatgacagtaagtggacagcggaggctctttttaatctgctggataatgcggtgaaatataccccgccaggcggccatatccatgtcatggtaaatcgatgggagatgtatgtggaaatcaaggtgacggatacaggaaagggcatatcagaaagcaatcaggcggctgtcttccggcggttctaccgggaggaggaagttcacagccagccaggcgtgggcatcggactgtacctggcccgtgagattatcacgaggcagggcgggtatatcaaggttgtatccgagcctggaaaggggtcggctttttccatttttctgccaatccggtaaaatgtatatttttctggtttcggacatttctgtaacctttgtagtttatacttttcctatcagcaggcggtaagccttgaaaggagttttggctatgagtattttacaaacacttggcctgaaaaagttttatggcatggaatcaaacataacacgggcgcttgacggtgtggatttttgcgtggaggagggggaatttgtggcagttgtgggaacttccggcagcggcaaatccacgctgcttcacatgataggcggtctggactatccttccggcggcacagtcctcgttcgcggtgaagatttgtcaaagaagaatgatgaacagatgacaattttccgccgccggaacatcggatttatttttcagaattataacttggttcctatgctcaatgtatatgaaaatattgtcctcccggtggagctggacggagatatggcagatcagaagtttttggaaaatgtggtaacaatgctgggactggaagaaaagcttgacagaatgccgaaccaactttccggaggccagcagcagcgcgtcgcgattgcccgtgcgctgatgacaaagccggccatcgtgcttgcggatgaaccaacagggaatctggacagcaggaccagtgcagatgttttgggtctgatgaagcgcaccagtgcggagtttcaccagacggttgttatgattacccataataatgatctggcatgccttgcagaccgcatcataagattggaagacggaaaaattgtggaatgacggaggggagaacttatgacttggccttttgaaaataatacggcagcaattgtaaaacggctggctaagcgcagcctgcaaagtgagagacgccgtaatgccatggtggtgatttcggtggcactggccgccttcctcatcagctttgccgggggaacagcggtctctcttatacaaatgcagaacaatcaggtaacggatacctatgaggccgtatacagcagtctgacagaaccggatatggagattttaaaaaagcagcccgggcttgaaagggtaggggaatactatctggttggagaggaacaatccgggcagggttttaaggggtcctttatttatgcggatgaagctatgatgcatatgggacggaaacaaatggaggttcttgatggagaactgccaaagcaagccgatgacatcatggtaagtgagaactggcttgaggatttcgccccggatgccaaaatcggggataccgtgtcactgggatcggaaaattttccggatatgtatagaatttccgggctgctgggtctgaatggtggtgagagttcagaaacctacggctttgtcgtctcgaaagcaatgcttaagcagctgcccgaatataaaaaatccggataccgggcttatgttcatttaaggaatgttatggagttggatgaagatgagataaaaggatattgtgaggagattgccgaaaaaaatggattatcagctccgtcttatcattcccagtattttaagtgggcttttgggagtatggactttggtacggtcgctatgataggtgctttggcggtggttgtactgattggaggctgtgtggtgattcagagcattttccgcatttcaatcattgacaaaatccaaagctttgggcagctccgtacacttggggctaccaaaaagcagatcatgcggatggtaagaaaagagagcaggcagcttggagggattggaatcttagttgggacagtattagggattgtcatgccgaccttttttgtgccggacggatttaatctcttgggaaacctggcagttaccgtggctgcggctctgatctgctggggaatggttggcatttccatgaaaaagccggttaaaatggcggcggatatttcaccgattgatgcagtacggctggttacagagcagaagaaattttcagtcagcagaaaaaagaataaaagactcaatcccgtatcccttggaaaaatgaactttctccgggataagaagaaggcagtcagcataaccgtttccttaagcatcggcgggatactgctgctttgcgcatcaactctgcttttgacctatgcgccggaagccatggcagaaaagtattttcctaatggccattacaaagtgtatcttgaatcagaagaagatacagcagaggttctctcctccgggaacccgttgacggaggaactgagggcggaaatccttgcagttgacggcgtggaggatgttctcacaacacgaaagggggcaggtgcggattatcaggcgggttcatattccggcggtgggatgggagatatgattacagatgacaattatgaaacccttaaggaagcgctgacagaggggaacatgcccgctgatgaaaagagtgttttgctgccggactttgtggaggtcaaagtaggttctgtcctgaagctgtcaatgggaaaaaacacggcagccgttacagcagccggggtattcgatataacaaaggtaaagtccggatatggacatggagggatgcagcttgacggagccatgctttatctgccggagggactgtttgaagaactgatgccgggtgtggagaatctggattattcatgggacattgtatgcgacccgaaaaaagatacgtctgtaaaactggcattgcaggagattatagacggccatacagaaatcgcattggataccttcgagggttatgttgcgtattgccagtcagggaacacacttttctttcatatcctgcaggggatctcattgctcatttccctgtttgggattattaatctgatcaatacatcgctgtcgaaccaaatgtcaaggaagtgggagaacagtgtgctgcggtccgtaggtctgacaaaaaggcagctttaccagatgattactgtggaagggatggggtatgtattgttgggcgttcttttgacgacgctggttggcctgcctcttgcgtatctcctgcaccatgaaatgagcgctgtgatatatggaagcccaacggatttccggtttccgtttttttatatgtcactgtattttctgctgctgttggcaattcaatttctgctgtctctgtggacaattaaaagacaggagaaacagtccctggtcgagcaattgcggacattggaataatatgtaagataggatttataagaataaaagctgcaaatcacgattaggtgatatgcagctactttttatttctttttacctgagtttcttttcctactttggtcaacaactttctggtaggtcagcagagctactgaaaagtagtcttctttttcatatgcagcttttaaatatttttccagtttttcctcctgcatagcctttcctctggttaattgtctgactaaatctaagttgctaattaaccaatctgttgcctgctgcaattcaggcggtatactatcgaaattatccaatagattttgtttgtacgatgttatttccatataagaatccattatctcacctttcctttattcctatcttcgcagccttgtctataaattcttctgttgcatgtgtacggtttccagacaatcttatgaaatacgtttgtatttttggatctgaattatttcctgtgtcctcaattgccagttccgtctcatgcctacacttacttatggagataccattttgttgtgatactgcttttaatgcgtcattcatttttcgatttttgaaagacatatgggtaatcctccttaaaaatttgttcaaaataaggtttcattgtgggtgacggaagttgttcacagaacacttcaaaccattgagccatcatatcttgccaagattgtgaccttttatgtgtacggattttcatatcaagatcttcttctttgagcagcattaaaagtttggggtgatttctttcaagttctgccagaaaataatttaatccaagtgaatccaatagatagcataatctttcaaagtcacgcagctgcatactcatcttgccattaattctttttctatcatcatcactacaaagtgaaatgaatatcagacgttccttgttaatctgttcctgttgtggattaaaacacatatggcagtccccctacattccaaaaagttcttttatgtataccctcatcacctgcgatggaagttgattgcaaaattcttctaaccattgttgtctgatattcctttccatgttgagctttttttcgtcacccaattttacatcgttttcaatttcatttgccaactgttccaacaggtcgggatggctcatttcaaattccaaaagaaaatggtttaaaccaagcatatcaagcaggcaaacaattctttcaaaatcccttatatgtaaatctattgcgccagtgattcttttaccatcgtgttcagaacaaagagaaagaaaaatcagtttttcttttcttaccttctcaacttgcatttccttcaatttttccgaatttcctttgaattttttaaaattcttcttaagttcttttacattcaccttactttccaccttgctttctattgtttttgcctttttagaatctgtaaacaaatcctttgagttaatatatccccctttaattccatacggcatatctcttagacctatttttttcttcttcgcgtttcatacgtttatgtgacgtaacatgaggcaaaatatatgataaagtcaaaaaaatacgtcttattaacgtggagtagtggaatgaagaagataatctacggtaacaataaaaatattatcagtgagaatttaaaaacttttagaattcaaaagggcttaacgcaaaatgatttagccgctaaaatgcaaactctgaacattaatttagatcagcagatgattagcaaaattgaaaaaaatttacgctttgtaacagactatgagttagtatgtttctgccttgtacttgaagttgaagtaaaagaaatgctgcaaaacttctttgacaatctgacaaagcaagtagactgcaaaggagactagccctaagcaaattacctttgttttatcaatacttgctgggtatttcatctgttcatattcctattaaattaagttctttatcaaatacgtttatgtaacgtattataccttggataacgtgataaagtcaagtaaatacgtcatattaacgtggagcaaatacatgaagaagataatctttggcgaaaacaaaaatataattggtgagagcctgaaagtaattcggaaacaaaaacatttatcgcaagatgcgttagcagcaagaatgcaaaccttcaatattaatttagaccagcagatgatcagtaaaattgaaaataataaccgttttgtaactgattacgagttagcttgtttttgtcaagtgctggaaaccgatgtaaacgaaatgttgcaaaatttctatgataaccttaaaaaagatgtatatccagaagaaattacagaataaaatttcaatgtgacggaacacgaaaaggatttcagcaattacctgggtagggaactggtggggcggtagtgcaaaaccagtcatattctaaagcctaaaagggatgccaattgaagaaagaactagaacaaagctgctgacaaaaaatttaaaagggtacttgaaaaaatcaagtaccctgtgtataatttacttagaagtaatcaaaagacattgtctggtctgatgattgcgcttcggataactacataatttttagttacgtgctatcctctatgccagtagaggatagctattttttgtcacgatgattatctatgtaagttaatgccgcaaaaatcgctagcactaatgtcaacacttcaagtgtattcattttacatttcctccttcgtttatttccgaaggaaatcatcagactatcctctgacttctattcaattatacataataattctaacatggggatatgtaaagttcaataataaccaaaaccttctgtagttttaattgatgtatgtccgcactttacaatagcatgcatgccttcttgaacgattggaaagcgaaaagcaagtcaaaggtttgggtggtttggtatgaagaatatgtcgttaatatactgcctatgctggagttggtttcataaccccaacggtacctttcgcagaaagacggtttataactttcactgagattaattttccgtatgttgtatcagccttttatttttccagacagaacttctgaaataaagccatccaacgaggaatggcaggagaggggaaagggcctgcccgatatatacaccggagaacccgaaatctgccacaaatgccaacagccagcttacagggagacggacgatgacagcgtctaaaagtgcatttatcattgccatatttgcagcccctatgccgatagcaaaagaatcaaaggtgtacattaccgcataaaccaggctgtttattccgcagcagattcttaaataaaggattccgtctgcaattacttccggacttttagggtcaaacagcatgataatctgttttgcgaatatttgtacaagtatcactacggccagtgtaatcaaaaggtttaagcgaaggccggtttttgttgttctttttacgcgttctatcttatctgcacccatattctgcccggccatagcggttacagcctgcccgactgcccagcagggcatccctgcaaaggtgttgactttcaggccgatcccggatgccgcggcaacggacaccccaaaattgttaagcataccagtgatcagaagataagagatattgacaacaatcatctgaatcgctgtaggtaggccgacctttaagataacggtcagtttgtcaggcttaacggcaaattctctcagtctgaaatgaaatacaaagtctttccttctcagatggagtattgaaattataaaagaaataccttgtgaaaaaacggtggcataggctgctcccacagtccccatattgaaagatccaactaaaaggatgtccaacagaatatttacaactgttgctactgcgataaagtaaagcgaacttttggagtctccaaatccttttgtaatggagcagaccgcattataaccaaagacaaatacagtgccatagcagatgattttcatataattgcaggcatcctgcatggaagtagcaggaacatgcaacacttggaaaagcggtccgtatgcaagcagccctaatatggtgacaattaaggaagcgatgaaggcgatagagaatagtgtcccgatggtttcgcgctgccctttctcatcgcctgctcctttatattgggctaccagcacggtgcctcccattgtgactccaatacatacggaattgatgataaaactaatcatggatgcattgctgatcgcggcaagccctgtttctcctacaaaccttccaacaaccagcatatccacaatactgtaaaaagactgcagtaaattggcaaacagtagtggaagcgcaaaccggattaacttttttgaaacacttccgattgtcaaatcttgttcttctttcattgtaacatttcctttcttcatcttcatttttttcttctgaagcctcctatgaatacgggaagcaaaaaagcagaaggcggtcacgtacaagtgcgccctctgctttcaaactcataacagttaacatacaaaaggcagcagacaaaacattgtctgctgccgaaatatcagaagtattttacttatgaaaccgtacaaaaacaaatcccaaactacagatctgttccggaatacgccttttcacaaaataaattttttcttaggctccgcacaatgttttgtaatatacagttattcggagcttaaatcaatacaaaattttccgtataacttcattgtgcccgcccttccttttgatttataatctcattatagtcagccaggttgatactgtcaataacctatggaacaggtaaaggatggaattttctacagactggcgtgcttcgatatacaggtcaatatcctcgatgatataattcgttctagttgtgtgcagagtttcatagcaggaatagatatattcccacgcccgatagcgtctgaacagatccacaagctgtgtgccggttatatgcttcgtcattttgtattgctcagcgcaaaacatcataaaatcccctagactgctcataatcatgcatccttcggaaattcaaagcaacccgtcttttttttctgcataacggtgagtaaaattaaatttattccgatcatctacttaattgaggtaatcatagccgccacacagggagaagccgccgccatttaaacggtactgaaaatctatgaaagctatatctgtaataaatgtatcaagacagtttatgacgagaggggcttgtgtactacgggataggcacagataaaaaagacttcatgaatgccgtttaatccatgctatcgtggagaattttaaagacagacaagactacagacaggggcaggcaaaaagctgattgcccttgctgaataggaataggaaacacaggcgaagtatggtagaataaaaaaaatctataacttgaattttattattcggaaaggagcaaatgtaaatgaaagcaagcaggattaaaggcaaggctactataggtgtgtgttctccttcgtttccgatttcagcgactgagcctattcgttatgagagaggaataaaatatttagaaaataaagggtttcatataaacaatggacttttgtataagaaaaaagacttttatcgttcaggaacaataaaagaaagggcagaagaatttaatactctcttatatgatgaggacattaagataataatgacatcaataggcggtaataatacaaattctattctgccatatatagattacgagtatatgaaaaaacaccctaaaataattatgggattttcagatgtcaccgctttgttactggcaatttatgcaaaaacaggtttagtgactttttatggtcctgatattacatcatcgtttggagagctaccgccttttgtagattggacttttgaaagtttcaactcatttgtaaacggtatatctgtaccgtacagttatgaaatgcctgttgcttggacagatgaatttattgattggagcgaacaagacagggagaaaaaacaatattctaatcaatgggtttgtgtaaaacaaggaacctgtcagggcaggttaatcggaggaaatctgaatacaatggagggcttttttggtacagaatatatgcctataataaacaaaggcgatgttctattcattgaagatgcagaaaaagacgcatatacaatagagcgttctttttctttgcttaaacttgcaggcgtgtttgataaggtgagtggaatcattcttggaaagcacgaaaaatttgacgataatggaacgggtagaaaaccctatgaaattcttttggaagttataggggatacttcaattcctattttagcagagtttgattgttgtcatactcaccctatgctaacaatgccgatagggtgtgagatacttttagacgcaacaaacaaaaagattatgttaatggaagaaccactggattaaaaagcattatattttattgagtatatcacatctaaataaccgctaccctattgtttcccatgcgagcatctggcacctcctatatttaatgcatccatcatagcatatttttttcaagggtcttgtcacaggatgcctttttggcaggagagtaatcccttcacttaggagaggaattaaaaaagacaagatgcgtgcctacttcgtgaatcagaaggtaggcacgcatctatatggaagtttacactggtaaagccggtactgctatcttggcgccggtacttgtgtcagccccaaaattgaagctgggcgccacatcatatgccagccggtagccgaatgcggcagcgttatatttctgaacagccgcgtaaacacgttcaattgccgtgcagaaatcctcttcatttgcataaggctcaccctggaaatacagcatggtacattcatcaagttccgccactttatactgctctggcagcggtttatcatattccagtggtacttcgatacctgcagccgtctttgaaaatccatcttccacaaggaaatccggtaattccattaatgcagcaagttcaagcttttccgggatgctgttcaagagtccttcccaatcacagcccatttcttcgcagtatgagaaatagtcctgtgcattctttgaggggagaaaaatcagttttcttttgcttctctttacgggtgtgatcatgcataaattttggtcgttattcataattggttcctccttatgattcagcagtgcataataatgattgacgggatactggacaaataatggtattgcggttttcttatcccggtattcggatggggtaagtttaaactgcctgcaaaaagaacgggtaaagccttcgtgggaatcaaagtggctgttcagggcaacctccagaacgggtgcttttgtatgcagcagtgtgtctgccccctgggtcagacagaccgcttttatatattcctgcagagttttacccagatactctttgaacagcctgtccgcatgccgcctggaatatcctgcatgggaacaaacagcatccgcgctgaaatcctcatccagaaagtgcagacggatataatcctgcattttctgtaccgcttttacataatccatcaatcgtatccgctccataattaacatactttgttcataaggtaattgtcttgactttttcggacaaatttcatccggggactattgtaccatattttgcagcagagcaaaagatttatgtttgcttataacgattgcctttgtctatccagatggtgcctgatcgttacggtctctccagtttcttcagagatgtgggaagaaaaaagacagtcccaaagagggcaggagaggacggcgccatccgttacaaagtaaaagggtaggtaacgcagctcatccattgtgcgaaaagaatgaaacagcagttcccccatttccagtgattcacacaggaagatgggaaacgggaaagggtgccgttcctggtttttgctaatccaattgcgcagggattgatatctggtggccgcgtttgatttccagccgggtccgaaacggacggggattggaaatatagagattttttcctgttcaccaaaaaaggcagcaggagccgggcagtgtatagcagcgtcaatgcagaaggcttttgggccggcctttttccaggtcaggtaatttatggtccgtaccgatgggtagttgaaccgcatccgcataaggaactgattcagtgccaacagctccagtttccgtgtgtcattcatagctgcctgcaatggatatgcaccggcggtcaccggcgcgatataggaataggcgccagggattaaatcatagaaccttaaaggggaagcactgatggagccgtcctcatcgtatctgatgaagtgataccgggccagtatgccagcctttaccagttttttcaggtttgcggaaaaagtttcttttttataatattcatgtagcgggctcaaacggtttataaaaaagtctatgttataggaatttaaaaacttgtaagtagcaagagcccgcataatcatcaggtccgcagggccgataatattttttaatatcagggagtcaatttcaaagtgcgtgcagctgcggtttttattctctaatctgctttcccaagcttcctccatatggaatggagttttatcaggaaatataaattcttgtatatctgtgttcataaacgaatatcctcctgtatcaatttattcgaggcaacagttaaggcaagccagaaattttactataagagcccatccagggattcgcttccttcggggatgtccgggttcgtttcgggcagggcaggggatggctgttcaggcaggggagacgtgtccgtctgccctttttttaagtaaccggcataggttccctgatccagttggagattggaaaaatcgggatctgccttatcttgcgcatccggactgcccgccgatggcatttgattcctggtaaaagcccaaggattgcattcccttgtttgtttctcccagtcctgctcttgcaggaaggaaacttttccttgtatgactgggagcggcctgccattttgggtcgtaaaaaaggtaacttcctgaaaatcctttaggcggatgtcaatttcctccagcacattttttttcgtaacgctttccctggaggaataagacaaatgagggtcgtcctggctgagagaagtttcggaagtcatctgctgttcttctacttcatcatgtactccggcaagcgccgagaagatttccatatctgaaagggaagatcgtccgaagatgatggcatgggcgcatccaagtataacgcccttcatataccgggtaacttcatttttttccatctggtcaagcgtctggatcgcgacaaacataccgacgccgaattttcggaacagcacaaaatttttctcaagtgaaggatggattaggacaggaagctcgtcaatatagaaaaagtgaggtgtcctgtttttttctgaccctggccgggaaagcacggcgttattcatggacaataggaaaaagagaccgaaagcgacggcatcgctgtctccggcggcaaggttataattacatacggtaatttccccgtttgccagggcacggtcaaaatctatgctgtcctgtgagcagaatacctccttgttggctggcataatcaggaactcattgataatgttcctggtgccccggctctggtcctccatttttgtgcgtccaaagcccaggatgtcctggcggatatattgaatgatgaacgtataccggttttctttccggtccagttcttccagtttgtctacatattccggaaataagtcaaaattatttataagaagctgcagatccgccggggaggcatatctcttttttagtgcaggtacggttaccatcacaaggattgcaatgttcgcaatcatctggcggttcagactcgtgaaataggagtcagcttttccttttaagtcagtaatacactgcatcacgtccgaaaagatcactgcttttttgacgataagctggttttttctgtcctcatccatgtcatttgggatataaaaggggttcatgcccttccagtttttcttccgttccccgtttttactgcgggtggcgtcaatccggttataggagatgcctctggcatcacagaggcggcagatgtcatccgtcaaagaatcatccggtgccagggcagtgataccgcagacagggtattttatccgtatctcatccaatctgctttcgattgccgccttttcttcctgtgagaattctttttctggcgccgggataaactgattaatagaaaatgccctgccattggggacataagcaatcttcccggccttttccatttcctttagtagttctacctgcatatcctcggccttgcagcgcatattcagatcgtcttttatcgcaggcaggatagtggaagaagtttttcccgtaccgctggtaccatccaccaatacatgcaaaaagcggtccttttggtagatggggacatatttgcctgtccggatatcttttacgattttgaggtcataaacgatgtcctggtctttcgggcgcagatagtgtgtaattttaaaggaaaggatacgcatccggctgttctcattttttaagatgtaaaaaacccctttataaaggaagtaaccgatgggcagaaggggaagctctgttaaggcccgcgcaagcaaaagtaccatatcctttgtaaagatatcgtctgtattcagatccataaccaccggcaggctgagccgggacagaagccggaacgcatacgctacgattaagagccaggcatggaagagcagggcaatggtaagtgtaatccgggtattgtgaaaattataaagctcatattttgtactgaagatatagagaatgcctgatatgaaaacccatagcaagggagacagcaagggggctttctgataatcaatccagtataatgcatttaggaactgccacagaaaatgtagcagatggcagaaaaatacaaaataagcaatatcagccgggagcgaattatgatggcttaaaaaatagtctttcataaaatgcagaagcagtttggggtggaaattgtgccgtttgctatcctttaccgggctccgggatattttccttttcatagcggcacctgcctttctgataactggatttctccattgaagtcaatctcaactgacactggttttttatcataggtcccatctttgagtatcatttgatagagataaacagaggatggatcttcataaatcgccattgtcttatcaaggaaacagatagataggtgggggaacctgtttcctgtatcttccagctcttcaaaaaattctttacaatctgtattcctgctgaccaggagaatcagcagaagggggttatcgtaacaatggcgggatagaaagtagcggatgcgttccttcccccctaagtcatgtacaatgtcttcaaaaacaatggctgacccgtgagcacaaaaagtgtttgtgaatacaaaagatgcctgtgcccggtcgtgaagttcaaaaataggatagtattccatatctatgctgcatccagagtaataaaggcattgtaataactgctccggtaggcgggattcctctgccagcacgaatggagccagttcgcgaaggcggtggtttggcaggacatacagatgcattccgcgccgcagccgggaagccagcacaggactgcctggtatgagccgataaaatttttgctgcagcctctttttaaacatcaggtctttctgttctaatacggcatcattataagctgtgtcatccagcaaacggttcttgaaagccactgtctcctggtaggaaaggttcgggttttgcatggcgagccttgtgacaagctctttatcggcctgtgagagaagcagacccatattcccagacagaaggcgtgaaaagtcctgaaagtttaaaggcatggacgagggctccatattattccacaactttaatgctttcaataaaactctataaaccgaaaaaggcggctttttgggaggatggtctttgccgtcggccagcagggtaaataccagaatattcttgcacacattccgggaagaaaataaatccgctttcaggtactgctccagcttcatctgcaatatgctgtcagactgtgtatggttatcctgctcaatataatacgtgtggtaagctgtctctaaacagccgtcacatctggggggctgcataccctgagcggccgctggcagcaatcctttttccaattcccagacacaggggcgtgcatggggtgaggcaacataagcaaaataaaaatcgttggtatggacccggtgggggagctgctgccggcttgcaggcgggcgccggtcaaaatttgccgacagccctttcagataatcttctgggagcagccagtgcagcctgtttttacccttaaaggtcaggtggtagagtttctttccatctgcatatgtttttccagtgatataaccttggttttccagctttttcaggctgaggcgtccggaagagcttgtgatcccgtgaatgcctgtaaaataaagctgctggtaggtgatggtgtttgcctgcaggatcaagaacaggtctgtatcgcttttctgcaaatgtaaaagccctgcatcttgcaccagggcctcttcaaagtctgttttgggtgttttcattgtcattttcctttccggtttctttttgagtaataaaaaagcactgctttttagcagtgcgcagagtgtagccaaatgttattcaatttattttataaactgcatttaatgttttttctccatctaaccccttgtcagtgtataattgcatttcatatggaatctttttatgctgcaggcacagattaagaaagcataagaaaatcccaatatcaatctgattatagaaggacaccttatcagcaggcattatccccctcttgccttgctttttatatctataaacatgtaaagcatgatctgtatgttctacgatccagggctgtgtattgcaggcgctgggggcaaacctggcaatgtcggttactccttctatcggctccccaagccaaatttcatcaatgatcttccgcttactcttaaacatatctttgcggaactttttctcatcctcaatttttgacattgcaatcatgatcacaaaatcaaggccctcaaaggaaggttcatccgtctttccaataccgaaccagagtgtcccaatgttttgagaaacgaggtataaatctaactgctcccctaaatacccaatattctgtagataattctcttttttctcactgtatagtaaaatacagtactcctgtccacgcttgcaggtggtctcattcgcgggaacgattctaactgcggtttttatatcagggtacagcggaataaatgtcttatatatttcttttatattttcaatgtcactcgtagatatatgttcgtttccaatatttctgaacaaatgaaacgatttccttttaaaaatcatacggtacaattctttgtttaagtcgtccattcttttcccttctaatcttatttttatacctgacagacggggaattataaccgccaccagacagtatcatttctggcatactctttgaatccgcatctcattagaatcttttgtgatgaaattccatcaatatctgtttctgcgattatatggtttacgccgatttgctgcatgccccacttacagaaagcctggaccgtttctgtcatatagccattatgttcaaagtcgtgccccaggccgtatcctatttcaacctcaccatcactgtttggtatgtccttaaaatcaatcgatccaattacacaagaatcagattttgtaataatgaaccaaaaggtatgccataaataatggctagggtcttttttggctttatctgcttgcccgcatacaatttcacggaacaatccttccattggttctgctttataggagcatgacagctgcttctccagttctgcagtatcattggtccataattcaagctgttcgggggtaagcgctattatatatagccgttccgtttcaattttcattattatacctttccgcaaatcatgtcgtgtttgcttctacttcgattacatcaatatacttaatccactcatcaagagtccaatacaaagcactgcacctcattataacctaccacttcaaggatcagtataaatcaaaacatgtcacctatctctagggatgcgtatatacaggccgtttccaaaagaaaacataaataaaaaactatataaattatatcagaaagtaaatattgcagcaagaataatcttaaatctaatggggcggtctaatggaacggtctcttgataaatcgtccagataagggcataatatggacgaaagggtcataaggctggatgaaaaaatggaagaaaagattggcaaattcactggatcagaagtgattgctgcgtgtccgagagcaggacgttctgcaatcctaaatgccataaagaaattgactgaagaaaatgtacttatgaaatgcggagccgaaaaaggcacttactatgtacgaagtgatgtatttgaggaatcgtaaagtcatattagaggaaacatagcctgtacacagagacgagagagctatggaaacgaaactgggatgtctatttagagggcaggtaacagagaaccctcaaatatgctttgacaggaaatgcaatgcagtatatgatgaaagtaccatcttatttttataaccaaaaattgcttatgtaattttagtagagaaaattaaaaattcctggaaacaggtagaagagagcatctgatagttgtcaggtgcttttattatgcataaaaggaggataggagtgctgtttattacaattacaacaggcagacttagagtaaaaaaagatggtaattttggcgcctgcgatgggtgccttttttattacaggaggaaaaaatgatgagagacattactaatttaagagagttaaacaaagaggattcctttgagtttcactgcacctgctgtggagcgtgctgccgtcaccggaatgatattttgctaagcgcttatgatatgatccgtctgcttaaatatctgaagatgacgctaagtcaatttacagaaaagtattgccacttgtatgttggcagtggcagcaagctacccttggtacggataaggccgataggaaagaacgatatctgcccattcctgtacaggggaaagtgctcggtacagcaggcaaagcctacggtatgtacattgttcccgttggccaggggattcaatccatcaacagggaaaatccagtattatctgcaagatgtaaattgcggaacaaaaaatgagatgcatagggtagaggactggcttcgggaaggttttaatgaagacgcggaggaatgttttgcgctgtggtccaagatgctcctcattttgggggatttcttaagagaaaaccaggctgcttgtacagaccggttttacaatctcatatttgcagttctttatgatgattatgactacgataggaattatgtggaacagtttcaggagagggctgagatgataaatatactggtagtcaatcttaaaaacctggttaatgaatcatccagccacatacagtcaaatgcatagacgggaaaggaaaaagtatggagaataagaaagaagctgagcatgtatggtgtttggagtcgggggaacagccccggcttattaagcttaggccacagaatattaaaaaaggaaattattttttcgtagggggtaaagcagttgcggcggcttcatcagtggaaactatggaattatatggtaaagagcaggaataccttaccgggacagatatgcaaaagtattttttaaaagatttgttaccggcatacggttattttttatggaattacaaggaatattcgatgactccgctggcttttatgcagatcgggctgctttcgccggataagaaactgaatctgctccgggattttcagctgtggtatgaaaacacagaccaggaaacagaagatttttcgctggaatttgaggtggtgtcaaggatgctgttatttgatgatgccattataataaatcccaaatatcttcgtctttctgaggtaatgcgtgatttaatgagttatatgcaaaaagagcagcaggaaaggtatttaaaagccagggaaaagcatttttatctgttcggagatgcagtgcaatatagcttcaatgtatgatactgtttcagctttacagtggagcgaaagattgcataagatggatattttgagacaaaaaaggagaggcataaaaatggaacgtgaactatataaaatggcggttaaatttttagaacaatttctcattcaggcagactgggatgacgtgaacgtgccagaacaggcacgggctgtctttacaaccatatgcctggcaggggatatgaatgcggataccattaaatgtgatgatttgctgatgcggctgtatcctatgctgccatcaaacagtgcggaacttacctatgaggagtttgaaaactttatgttggaatggattgtataaaggagcatctatgataaaaggagaaaagtataggaaattacatgagttaatagaaactgaatccgaaagagaatggaatctgaaatatgaaacagcagatatgtatgggatttatcaaattatggaccagggaccatcccagcacatgaaatttatggatatggattttttaaaaaaacacggggaatatccaaaaagagaaggctatttacttgtttatacagcacccctttccggggaagaaacattggacagtatttatatcaagttcaatataggacatccgaaagattattatgggcattctctatccgtaagcgatgtaatagtaatccaaaaacggggaaaggttcaggcattctatgtagacagcattggttataaggaaatccctgaatttttcagacaggatacagggaatcctccggaagatataactcatagagaaccaactttatgtggacatttccacatattattatacccaaaaagaacgaaagcatttatctatacgaatatgcaggaggcattcgatgcttatttttcacttcctatgaatatgaataaaagattgatatttaagagttttctctatgagccgcttcttctccttgtgcaatgtcaaaatcaaatggatatgttaggagaaggcaataaacaggataagaaccggaaaaatccgaatgaagactacctgatagagaaaacgaaggagtatctgcatatgaatgaaccggaggaaatggcttttcgactgcctggaaagaaaggatatttcctgatccagacatgtgaagatggatttgactttacactttatgatacagattataaagagatagacggtggacagtgggatgcgcctatagaggacggggaaatctacttaatgtctcaagctgtaaaggaggttcttgaagattatgggatttattcagaaaatctggagatggtaaactatcagaaactcttagagaaagtggaagaggtgaaccgtatccctttttataatccgctgactgaggtggagcagttcaggacagaaacggaacgaaacttccatccgatccagggaaagtcaccatcagaaatcgaacagtatgtcttagcatatgcgcaagagaagattgcggaaagtggattggaggctgatgttatagatgttgtgctgttcggatcaagaagcaggggaatggagcggccagattctgacttggacgtagttctggagtatcaaggggatgacgttagagaggacatcctttttaatttgctgcacgaggacaatcttaagattgggagtgtacttatagacataaatcctatattggcggaaaaatctggcactctggaggagtatttgaaactggctgaatcatatctgagaaaaaattaaattctcctgatagcagtgccttcaggagatcgaagaaggagggcaaaaaacaggcaaggcctattgttaatgcaccggcacccagcgcagctatcgctgttctgggtgctgatgaaaggaagaaattactgcaagggtttttccgattcattcttcccgtatttctgtttttcttaaaaggaatgcaggtattttcccattcacaggaattaagccatccggagttgagatacaggtgcatttccttattaagctgatataacgggtgggattaacagcaccgagacaaaaatcacatgatgcagcttccagaagtacagaggggtgattacttttgggactggaagccccgattcttttaaggctaatgatattgaaagaataatacaccttcaaatttttcatttgtttagaagtataaaagccgtaatcagttccgtaatcaaaaatgaaatttatgtaccctttgtttaataaataaaccatttgtaataaattaggtttaaagtcatccttaatacctttagtattttctgaatcggtaaataagacagttggcagtaaaaagtctaaatttttgatgtcttcgtcagtatacacgatgtcctcctgttctgtatgaaacaaatttttgtacagaatattagtctgtataaataaatgctctttgaagaatattatattatagaactttgctagttacaataatagcagactattaaaggaggctgtatatggaactggattataaagcaataggacgccgtatgaaagaaaaaagaatggagagaggacttacgcaggaacagattgtagatttgacaggaatatccaattcccatatcagtaatatagaaacgggaaaaacaaaggttggtctgcctacactggtactgattgcaaattgtctgcaagtaactacggatgacctattatgtgataatctggtaagcagcgttaatacgtataaaaatgagatttcaaaggtgacagaagactgtgacgatattgaggtcaggattattgcggatacatgcaaggcattaaaaagcagtttgcgtgaaagggctaatcagggatggaaattatctgctttggcggaagatgtctgagcgggcaatcttcagacagaaaaattgttattatgtaggaggcaggattctttaaaaaatgctgaattttagcggggtttacgggattagaaattacttgcccggagaaattagtggaaagttattattagaaagaaagtttgttatcagaaagtaaatgatagaaagtagaaaactgttatttcttattgcgagttcacatcttaagatgtgaaagagttaaaaattcctggagacaggtttttaggaaaagagcagtggaactcggcatctggagaggaaaaccaggtgctttttttatgtttaaaaggaggatttccaatgaaagaatttacaaatttatggtttgaaaatgtgggagataaggtaaaggagcttctacaagattacagtgcgaaattgggatttgaactgcagataggtaaaataagttatattccgggactggagtttacggttcagctgcagtttcagaaaaaagctaccgatgattctgatccgcagaaagataattggaatcagtggtgtgaagcatatggactgaagccggatatgtatggaaaaaccatatgtatcaaaggaaagaatcttagaatagcaggtctcaaccgtactgccagaacaagagtggtagatttggttggagttgacgaccatagacagtataatatggatgcggaatcattaaaaagtgtaatggggattggcggcaaagagtcttatgaagatgagagacgagaatgggagatgagtgcttttctttatggattaaaaggtgtaccctttggcgcggtatttcattaccatggagagagttataaaattgcaggtataaaccatagggcaagggagtataaaattatagcagagaaagtgtcagatggaaaaaggtacaaattcaaaccatcagacgttatcaagggattaaagtcataacttagatagtggcggtatgtttctataatggagacataccgccactttttcaaccaaagtaacaaaccaaaacaaaatttataaatcagccggtgcttctatcaagcgccggcatttttgcgtgaatataagggattgaaaaaccatcattaagaatccagtcttcaaccatatccttttgtagtatcacaggcatgcggttatgaatatctgacatagaaagattagcctctgtggtgaggataacaaaccgcttttcccctttgaactcgttgtaaatcccagccatatatagggtatgctcgccgggaagccggaaacggtatttcgtcttctgtccatcctgcgaccattcataaaagcctgtactgggcacggcacagcgccgctcatagaggctctttttgaacattggcctgtcctgggcggtttccgaacgggcattgatgatgacgccggattttttctgaaatcgtggaaagccccagatcgataaatcagcttggagctgactatttttctgatttaggataggcgccagattggttggaaaaatctctccctttttcatttgattgccggggtatctggcatcaattgcatgtacaatccttaatatttcctggttttctgtatctgtaaaaaatgtgtatcttccgcacattatgtttttccctccacaaaccatcgtgttttttcaaaaaatagataggcggtccttgctccaatccggatggtataccgcattccctgtccgcctgctttcagtgatgcggatcttcttatatcgagcactttgtctattgtaaactgtctgccatctttccattcgatagacagaggagtaatctttccctctaaatcgaatcgggcagtaacagcaacaaatactttttccgccatatgcaacctcattttgatgtgatactgtaaccacccgtcactggaatggttacgtcatactatcattatttcaacagatgatacagattatccgtggtttttgagaaaagcttccggatatatggtgtgttctgcaaccgggtcgagattagaaagcaccggatccaaaagcataatccccctctgaacggagaaatgcccaaatcttcttcgtatatcatcaatggcatgctccaaatcttcggatttttgtcgttttacggcatccggaaggaaagaaagctgttgataatccctggaaataagattgcaggcacgtactcccatactgcggactggctgatcggggggattattcctgtataattcataagctttctgaaagatttcggaggaaatgcaggttgggtatatgagccgcccctgtctctggtaagcgtgcagggtgctgtccctgatactgatctgtacgcttcggcagaaaagtttttccttacgcatccgctcagccacactttccgcaaggatatacaggatgatttttatgtctgtgtctgaaacaaggtcacggggggcagtcgtgctgttcccgattgtctttataatagggagagagtgggagtggcttaccggggaggtgtccaggccatttgcaaagcaccagagcataataccgtttttccctaaaagccgttctaaaaaagaaaggtctgtctgcgccagatcacctatcgtttggatgccatatttgaggagcttggagtaggtggcttttccgacatacagcagcatatctgccgggagatgccatattttttcgcgaaaatcttcaccgattacagtggttgcatctggtttgtgcaaatcacttcctaatttggcaaagattttgttataagacacgcctacgctggcggttatgcctagttcggaacggatacgggagcggagttcatctgcaatctgccgcccgtcaccatacaggtgaatggactcagatacatccagccagcattcatccaaaccgaaggattccactttgtcagtatattcctcataaatctcatgagccatttgagaaaagtcaatataccggtcgtaatgaggcggtgtaaaaatgacatcgggacatttttggcgggccatccataagggatctcccgtctgtatgccaaactgctttgcaaggttattcttcgcaaggacaatcccatgacgttccatcgggtcgccggcaacggccacaggcttgtcacgtaaggcgggctgaaacaggcattcgacagaggcataaaaattattcatatcacaatgaagaattaccatctttttctcctcgtctataaaataataatagtagtatcgggaggaaaaagagttttatacattcacgcggcactgtcccgccggtagtgcatcacccagaaactatatgaaatctgtaatttttttcatttcctatttacctaaaaaacaatattgacatagtgtcaactttttattgacaggaagaacgaaacactctataatttaaaattgacagtatgtcaatttaggagggttatatatgccaagagtttcagaaaaatatttaacagacaaaagaaattatattcttgaatgtactggtgagatattaaaggaaaagccgctatatgcagtaactatgcgggacattatcaaaaaggctggttttagtcagggtataatctatcattattatgcgagtttggatgaaatctatgtagactacattaacaaaaacactacttataatttattggagcagaatattgacgtcttgctaaaatcggatggagcggaaaaagaaatcctctccgaatgtattattgcaataggtaagtactttgaggaattgctaaaatctgttggtggcagaacctgctttgaattgacagttttctacgcctatgattttgaaaagagggcaatgatatttcctaagctaaaatttaagcaaagtctggcatatgctcaaaacaaaattttagaatatgtcttgagaaatattgaaaaaggtatcttttgcccacaaatttctatccgttccattgtcttgtttataagtagctttatagatggaattgcccaaagtgtggcaactggcgcatcagaaggcaatgatatttttggggatatttctatgatgtttgatactttagcaaaggctgtgattggttttttagaggtataagtgaatggggttaaaaaaggcatacaataggaaagcccctcgtaaaaggagaaaaatatttattatgttgtttttaattatagccattatttttttaggtttgctaattatctttatgaatagccccggtaaactttctccgttaaaagatacacagggaaatgtgattcaaggttctatttccgaaaaagtttgggttgaaatcaatggaattaagcaaggtatgtttatccgaggagagaatactcaaaaccccgtcatactgtatctgcatggcggtcctggtacgccgatgttgcaatttattacatacttagtaaaggagacacgcctcgaaaaatattttacattgtgctattgggatcaacgcggttctggaatgacatacgataaatcaacttccccctcgactatgacggtagcgcaaatgatcgaggatactcgcaccgtgaccgaatatcttaaatcacgtttcggccaaaataaaatatacctcattggtcactcttggggatcgtatctaggtgtgaaagtcattgaaaaatatcccgaaaattatcttgcatatattggtatcggtcaagtcacaaatcaggtggaatcggaacggttagcctatgattttatgcgcaatcgtgccaaagaaataaacgatcaggatgttattgaaaaactaggtgaatttgatccgtatgcagatgattttccgcagctcgattacctcgtaaaagttcggacaaatatgctcaataaatacggaatcgggcatttacaccaggggcttacccccaccgacattcctaaatcactttttatatttaagggatatacattgagcgaaaaaatagactggtttcttggtgctgatttttcaatggtatatctgtttccggctgtattagacgataatctttttatatcgtctacaaaatttaaggttcccttttatatcgttcaaggtgatcatgattacatggtatcacagagtcttgccgaaaaatatttagatgttattgatgcgcctgcaaaggagtatttttcattttcaaattcagcccactctccaaacatggaggagccggaaaagtttattgagatttttcgtaaaatagcattagaaaatccacctgcaaaataaaggctggaatcattagagatttctctttcagcctcaaagtgtagcatattgtcgggatttctaacagacccatctaatatattctattatccgtcttattcagcatgagaaataaaatcagcaagaaatgtgaaaactctcatgggattcttgtgtaatatacatatagggaggcttgagcatgaatacaaatatagaagtaattcagaaagtagttggatatattgaaagccatttagaggaaagcctggatttggacagtctttgcaaagtatctggctattccaaatatcatcttagccggatgttttcggatattacaggtttttctatgcaccattatattcagcgcaggagactgacggaggctgcgcggatgctgattttcacagataagacgatcatggagattgccttgtctgccggatatcagacacagcagtcctttacggttggctttcggacattattcaaatgcagcccccaggcattccgcaaaaaaagagcgttttatccgtttcagcttaaatatagggttgacggagcgaaaggattaagaggtgataagatgatggggatcaggaccgttgaaagtgataaaatcctgttagttggttacagaaaaagtacccgttttgggttctttgtgattgggcagtgctggcacaaaatccatgcaaacaagaatcggattccctgcagaaaaaacacggactttctgataggacttaatgattatacaaaatgggatccggatgcagatacacagcctgcatttgattactacgcagcatcggaggttgcacgtattgacgcaatcccgaaggggatgcaggcaatggaacttccggccacaaagtatattgtctttagctttcgggcaaaaaatgaggatagcctgcagccagtagccgattacatctataaagaatggcttccccaatcgacttgtcagctcaacgaacatgcaaggtatgatttcgcacggtatggagaggaatcgggtgcgaaaggcgagagccttattgagtactgggtgcccgtattataaacaggctgccgcgcagcattagtcaataaagcgatgggcgagaagatgtaaggaggctgatttatggaaaacatggatattgcggaaacctttgagctgctgacagctaaaaataatcaggctgcgtaccgtgcgctgcaggtactgcaggatgtgagtgaaaatacagatgcagtatatgcatatatggacaggctcggagatatgctggacagccataattcttatatacgtacaaggggtctgatactcattgcctgcaatgcaaagtgggatgtggataataaaatagatgaaatgatagataaatatttaacccatatcacggataagaagcctattactgccaggcaatgcataaagcttctgccggttatagcgaagtgcaagccggagttgcgggaggatattaccgctgcgctgctcagggcggacattactatttttgccgatagcatgcagccgctggtctatcaggatattcagaagtcattacagtccatacagcagttgaaaacggaagggttatagtatatcatatggagtaagcccaataagcatataatcagaatcagtatgatttggcagtaagggcagtaaagacctgaaaggagatgcaaatcggtgaaactctgcattgcatttgctgaaatagttgggaaataatttatttaaaaaaggagaattataatgactatttcagcagaaaaaatatatccccgtactggagataaccagacaatctatttaaagaatgtcataacaaaccccaatataaccgttggggattataccatgtataatgattttattaacgacccggtcctatttgaaaagaataatgtgctgtatcaatatccaatcaatcatgataagctgattatcgggaacttctgttccattgcctgtggggcgaaatttctgtttaacagtgccaatcatacgatgtcttctttatccacctacccatttccccttttctttgaggaatgggatctaaagcgtgaggatgttgcctcatcctgggacaataagggggatattgtaattggcaatgatgtatggattgggtatgaagctgtcatattggcaggggttaccattggagacggagcgattattggtacacgcgcggtcgttactagggatgttccgccgtacacaatagccggagggattcctgcaaaaccgatacggaaacgatttgatgataaaacaatttctcatttactgcaattaaaatggtgggattggccaaaggaaaagatcgcagaaaatataaatgcaatcaaaatggggcttgtggaacagcttaaataactaacagagcacggagcgcgggggcagagttgaaaattgtccgcacgctccgtatctttttagggtaaagaaaagcagcatctgtctaattgacgaatggacgatatatttatgaaaattttcatattaacagagatatacaagcagcatttgtttaaaagccttgttctatatttcgttcatagtagtattccagcaattcacgggaataatccacaaccctgccggagggcagcagcagcacccgggtgattccaatctgctcaacaaatgatgggttatggctgacaaccataatggttcccttaaaaagatgaaaattaccgccaatgattgcctgcgtttcgggatccagatgattggttggttcatcaagaatgagaaagttagccttttgcagcagaactttacacaatgcaatccgtgctttctcgccaggagagaggacctccacttttttattgatatcgtcctcatagaagagaaaattactcaagacagaacgcagctgctttatggtatatccctctgtctgggcattctccaaaactgttttttgtaaatcaagctgctccagttcctgggcataataggcaacatctgttttaggatgaaattggatcttcccagcggcaggggtaaggaatcccatgataagttttaggagggtagattttcccacgccgttttcgcctacgaccaggaagcgttctttgccatttatctgaaaagataagtctttgtagaggtatggacggcccggataatgaaacgacaggttctctacgcacaatggaatatctgccccctcccgcatggggtggatatccatttttacacgtttatagactctttcacggctgtgcagcctgcttcgttttttctccagacgtaatgcccgttcctgccccatacgcttaatggcatggtttgtccggctggcctggttcgcccggcgtacaaaatcctccagttctttgatttctttttcttcctggacaatcatgcgctcacggaggagtttttcctgggcatatttctttttgtaagtgtcataattgccatcatagatggatattttatgggtggccttattaatgaatagaattttatttataacctggttaagaaaagtaatatcatggctgattatcagtaccatgcctttgtagcttcttaagaaatcagtcacaaactcttttgttgctgcatctaaatggtttgtcggttcatctaaaagcaggatatctgattttgcgtatagaacccgtgcaaaagctacttttgatttctgtccgcctgacagctgatacagcggcatatccagtaaatcaacatcaatctgcatacggtctatgatatccagtaatatgctttccgcctgataacaatcgaaaaactccaagcgtgactggattttttccatttgacgcagcaaccgcgcctggtctgaattaaccgctttttccagctcctgataaatctggttaagctctgtttccagcctgccgattggacggccctcctgcagatagtcaagtactgttaaggactcgtcctcaatcacgatttcctgcggcagataaccaatccgggaattgccggtagaaatttttccgctgtctaattcctgttcgtgcagaaggacatgaaacagagtcgtttttccagccccattcacgccgacgataccaactttgtcagaatcatttatctggaaatctgcatcctcgtaaatcacttccataccaaaggcgagattcatcttactgcctttcataattaaaaaacctcctttatgtggttgcctgttgggcaatatgctgaaatagtgctttctctttactaaaataaaatagagtttcgtttgcgaaactcgcgcctgcggcggtcgcaccgcgacatctacaatttacgccgcagtgcgcatcccgccgggagggctttttatctaataggtgtactttcctataagataaaaagcagagaagctgcacaagtaagtgcgccctctgcttttggtaaacatacctgatccataactatcaccctatgcttaaagcacggaccaatgttacggacaacaaaaggcggcagacaaaacatcgtccgccgccaaatagccaatatctgttggaaaacacgaaaacaaatcccaaaaactactgctttggaatataatagctgccaactattgttttcgtatttttaggctccgtgcaatgtcttgtgatatccaattgtccggagctgtaatcaatgcaaatcttgccaaataacactgcactcaccttctttcttttgggtattatggcataattatagtgcttctaaagaatgctgtcaagcggtgcatatctattttgtttccttgcattgtttgggaatagaaaatataataaggttatctaaggacagaaagcaggtgtatcatggagcaaaaaattttgctggtggatgatgagaaagacattgttgacctgatggaagaggtgctgcagaaagagggatttcatgctatccaaaaggcctatactggcgtagaagctttacatagaagccgggagtttcagccggatgtggttgtgctggatattatgttgccggatatggacggcctggaagtgtgcaggaaaatccgggaattctcctattgttccattctgtttttgtcctcaaaaaatgatgacattgataaaatactaggcctctcctgcggaggggatgactatattaccaaacctttcagcccccgtgaggtggtattccggatcaaggcacagctgcgccgccagcagtatcagacggctctttctgaaaacagcatgtcccggttgtgcgctggatccatttctatagacaaagaaagttgccgggtctacaaagatggacaggaggttgggctgaccggacgtgaatttctgctgttatcttatcttgtggagaatgcggataaaataatcagtaaagaacggctctatgaacaagtatggggggagtacagcagtatctgtgacaataccattatggtgcatatccggcatttgcgggaaaaaatagaagacactccatcggccccacagcagttgattaccgtgaaaggtttgggctacaagcttaaaaagaggattgattagatgaaacaatcgggttaccgcacagtagttcatatttatctgttgtttttactgtcactgctgggtgccgtactgctggcaggctgtcttttgtttctggcggttgccatccggacaccggatggcacaatcaagagaagtgattggcccaaggcttttacagaaaatttcaacagtcagattatttttgtcgatcattcgccgcagataaagcagacagggattgcattattacgggacaatgaaattggggttcagatcttaaattcttccgggatggaagtgttcagtgaacagaaaccggagcaggccaaggaggggtattccagtgcagatttactaaagctttcccagacaggaaaattagaggacagtgaaatgacagcctttgcaggaacagtctctgacgatggaaaagattgtgtgtatcttctgtacttccctgagaatatttctaaagttacgatgtatgtaaatggagagcggtttgcaggaggcaagaggattattctgccaatcctgttggtaatgcttttccttgtactcatttcgggcgccctctatggattatatacagcaagggcgatgaaacgcctgacaactgccgtttgggaaatttccgcccgcagttatcttcctgcccggaatcaaggcgtgttccaggaactgtacgacagcttgagtgccctggatgcggaaatccgggccagcgatgggctgcgggcgcagacagataaaatgcgtgaggaatggatctccaatattacccatgacttaaaaacgcctctttcccctatcaaagggtatgcggaaatattgcaggagctggactgcaaagggctggaatcctgcagccgctatgcaggaatcatattaaaaaatgtttcttatatggaaaccctgattggagacctgaagatgacctatcaattggaaagcgggatgcttcccataaacagggaggaaaagaatgttgtccgctttttaaaagagcttgtgattgacattctgaataccccggaatatgaaagccgtaccatccattttgaaagtgcagaagaaagcgttttttactcattcgaccagacgctttttagcagggcctttcggaatttaatcatcaatgcttttgtacatggagaagaggataccgaagtcaccctgcatatatcggtatctgatgccactatgaaactaagtatttccgataatggaaaaggaatgtcaccggaaacagtggaacacctctttgaccggtattaccggggaaccaatacagagcagaagccggagggaagcggacttgggatggcgatcgccaagggtatcattgaactgcatgacggcagtatttcagtttccagtattcctcaggagggaacggtttttcaaatggattttcatcccgttaaggttaattaaggttgcctgaaagttagattaaggttggcagactatcatgaatttagtgatagctgccagcttttttagttaacatgacttggaggtgatcctatatcaggcgctacactcaccagcgacacgatgttaaaagcgattgaaaatgcaatggaggatgcgggaaactcatctttcagaaagtaggtgttattttgaaaatcataatgaagtatgtttttaccaatgtcaaagaaagaaaaacgcgtaccgcagtcatgttattgtccattttattatctacaacgctgctgtttgtgtctttttccattggtgcctcgtatgaaagcgcacagcagaaaatggcgcggggaatggcaggcagcgccaccttgtcggtaaccaacacagagggcaggattggggaaagggatttgccggagttatcttccatagaggccagtgttcccatattggaaggaacagccctttaccatgagaacggatattatgaaaccgtggacctggttgcggctgacctcaataagctgaaccagatcaacccgccccgtctgaaagacggcaatacaatcacagggtttgccggaaatcagataatcttaccggaccgtttcacctcaaaatacgagatggaacagggggatacgattatgctggagatcggcggaaagccggttgatttcgagattgcagaaattgctgcttatgatacagtttttctcaggcacacacgaggtgcgaccgcccttttgcctctgtccacattatccgggctgtcaggggagaaagacgggtatacggaaattctgattgagcctgcccaggggatttctaatgctgaactgaaaaaggagttgtccggggcgctgcccggcagcggctatcaggtttcagaaattgtaaacgaggcgcagattgccgcagacgcaaggcagaaatccatgccctttttcctgattagttttttctctctgaccatgagtgtctttatcatttacagcagttataaagtaatcaccttagaccgtctgcctgtcattgggacgttccgaagtatcggcgccacacaaaaggcagtgacccggattcttcttacagaaagtatgctgtacggcattatggggggactgcttggaatcccggcaggcacattgattttgaagctgattctgcagggtatgggacagtctctcactcagggaattgagatccctgttgtgatttccccctttagtattattttttcctttgcagtggctttgattgtatccctgctctctgcctggcttccggttcggcgagcaagccgccttccgattaaggatgtggtacttggaaatgtggaagagaagcctgtttccagacggtttcttgttggaggtggcgctgttctctttatcctgtcggtgattcttcccaggctggtatccgggaaaatgctgtatctggccggcggattttctcttctggggctgattgccgccacaattatgatggttccgcttttgacaaacctggtttccaggggattggagcatttctatggagctatcgggggaaatgagggcaggctttctgcccggaatatgcgggataacaagaatatttcacagaacataacactgctgtttatcagtatttcagcagtgattgcgatcacggttgtgggaaatttcgtgacaacctatgtcagcgatgttttcaatggagccggacttcaggggttcgcagatggccatatggagccagagtttgtagaacaggtaaagaaaatggaagggatagaaaaggtactccctgtctatgtgtatgaaaaccaggtacaggccaatggtatcaccttaagccgcctggaagcaacggaccatctggactggtacagttccatgctggcgcttcactatacaaaagaaggcatggaagaacaggctgtttcggcctttgccggggaaagggctgtgatattaagtgagagctgtctggagcgcaccggtttttcgataggtgatacggtaactctggctttcggtggcaaagaaaacgattaccggatagcaggcagctttaaatcaagggctacagatgtggaagcggtgatttcctccggttatgcggtttccgattatggcgcgtccgcttatgatttccttgcctataccgccgcagacccggacgctgttatggttcagatccgtaatctgtttggggaaacctcgaattggagccggacggtagaggagtttaacacggatgccctcgccaccgtgggagcctttttacagcccatgcacagcatgacttatttcatccttctcctggcggccgtgggcgtggtgaataacctgctcatcaactatattcaaaagcggcgcagcattgccatgtacaagtctgtggggctttctaaccgccagaatataaaaatgacactgcttgtgggcttttcttccggattgattggggctggcattgccattttcgtttcctatatggagattcagacgattttccttgtggcaggcccaaagatttccatgggaccaaagcttaacgctgttaccttcctggccgctggcggtatggggattgcggtaactttgcttggttctgtggtaccgatcatgaaaagccggagcatgaagctggtggaagagattaagtttgaatagtaaaaggaggattttcaaatgaaacaggaaatcagcaggattgctgttgagggaaaacatatcataaaagatttttgcattggtgagacaactacaaacgttctaaaggatatttcattacaggttatgcggggggaatttgtatccatcatggggccgtccggttctggaaagagcactctgctctatattctgggaggcctcgatgttccgaccagggggcaggttctattgaatggcatggatatttccaattttggcgacgagaaaatgagccgaatcagacggcagaagataggttttgtctttcagttttacaacctcattcccaatctgaatgtggaggaaaacattatgcttccgctgctcctggatggaaagaagatgggcagctatcaaaagcagttaaatcatatattggaggtggttggtctgactgagcgccgcaggcatacaccccgtgaattatccggagggcagcagcagagagtggcaatcgcccgcgccctgattggcagcccggaaatcctctttgcagacgagcctaccgggaatctggacagcagaacagggaatgagattatggaattacttcgtgacattaacaaaaccagcggccagacgatcatcatggtaacacattccccggaagcggcgaaaagcagccgccgggtgattaccgtgcaggatggggggattctctgaaatagtggcaggagcgtgctttctaatgttttaccggaataaaaattttaaccttattgtccggattatcgaaagaaataatttcatgttcataaatttcaaaatcttcccggtcatccagttcttctttcgttgactgcagccatgtcccaaagatatactgatatgttttgtataaatttgccagggggccccggtgggtaaaaacggcatatcttccagagcttagtgtttttctggaaagttcctgcggcagatggtcaaaatcacgcaccggaccgccgaccatgaccgaaaacagtacgttgccgtcttttgtataagccgtctgctttgtttcgcatatgctgtatcctacaggtgcggcaaatacttctttacggagactgtggaactgtttccacagttcggggatccggttatcagaaagggaagttgtcccccgaagtccggcaatctttgtttcttctaatagaacgatttcgggtaatcgtgaaatgttattcgcgatatgggacacatcttccgggaccagttgttttttggcgttcattactaaatcgagtcctgctttccggtaatccaccgggctgcttccaaaagcggttttaaaagccctgctgaacgcttctgacgatgcaaagccgcagtcaagcgcgatatcgatgaccctctgttctgaatagatcagttgttcggaggctttgtaaagtctccggcggttgatataacgtccgacggattcacccagaacagaggagaacagccgggtcatgtggtaataggagtagccggtttctcttgaaacatcagctagaccaatattttcattcaaatgtgcttcgatatatgcaaccgctttttctaaaggggggtattgttccaagctagtgcctccttctcttaattttcaagcattggttctatataattttgaatcagttctattctgtctctggcattgcgcttaaaaagagaagcaatagagatcaccatattgttcttcgcattgacatagatgacattgccgccatcccccattgccgcatagccgccttcaaaaatccaccacaaatatccatagggcagattgcgtttattccagcggctatgttccttcgtactctcatctatccatcctgccgacacgacctgctttctgttccacgctccgctatttaagcataattgccctattttagccatgtccgccgaagagagggtcagtccccagccggctgtatttattcctgcggtatctgcagcccagccgctgatatcagtagctttattaaatgcctgctgttcctttgcattatgaaaaagaagattacgttcaaccgtaattcccagcggaccaaataaattttctgctgcaaagtcaaatacagactgcccggttactttaacaagaatgccggacagaatatccgggcctatgaggggggtatatctgaattctcctgtccgtcccctgcctcccagcaagtcaagcgtaaattttacactgtcttcactcacgaaataccggatgtagggagcaaaccgatacttatacggtgcggtcatagtcagcagatggaaaagggtaatgttctgtatcgttgtttctcctcttttgacagtgtaatccgggaaaaagtccaatactttctgattcacattttcaaggtatcctttatccagggcaattccaatcaatatagaaataatacttttggttacggaataaatgtggaacctgctgtcggcggtgcatccgttaaagcagccgtcgtacagcgttttaccgccctttaatatagtcatgcccgcaatattttcatagtcgcgaagaatgattttttccagctcttttcttttatcttggttcatttattttctccttaaagggattaaggacgtcctcaaaacaaaggataaccccattaaaaatgcaatgcaagccttattttaaaaatatataaacggtattcaggtgaccattaccaaatatcatatgttgacagtgtaatctgcaatatctacaatgaaagtattcaaaatcggatgaaactattggaaatagaatacaaaatttacaaaggagacatatggacaggaaaaaacttgtcgatcagagcattgactatattatgcagcatttagacgaagatttatcgctggagtctgtagcttcccggtttttcatatcgaagtaccatttttcccggatatttaagacagagaccggcgaatctgtgtattcgtttatcaaacgatgcaaggtagatcagagtgcggttgatatgaaattgaacccggaaaaaacaattacagacattggcttagattacggatacagttcatccaattatagttccgtattcaggaagcaccatgatacttccccggccatattcaggcagtccataccaacccatagtatgccggttccctttaccccggagaggactgcacatttcaaaactgccagggaatatgccgcccgaatcgagattcaaaagcttcctgacttctttgtgctctatgatcggtttatgggaaactatgtggatattgaaaaacattggtaccagtttttagataagtataaagcaaatttgagtgagaagaccattttagtggaacgctttttcaatgaccctgcaatcacaaattcaacacaatgtatctgcgatatctgtatgacagtggaagaggattgcggactttttaatgtgatgcggatcaaaggcggcaaatgggtagtgtatcattttgacggagaaatcaaagatatttttgaggaattacaggggattttcagcgtctggttccccaaaagcggttatcgcatggcgaggcgttatggactgaacatttatcgtcatattgaccgggagaatcataaggttgttatggacttatgtatcccgatatcataagagcaagaattcagaagttataaggacggctttctttctataatcaagaagtgttttagaaatacttcgatagaaaggaagtcttttttatgcagcctcaaaaagaaacagaaaatcctgtcatttggaacatagagtattgtacaccgcctgctgtattacgctattgtaaatatgcggaaagaagacggaatatttaagctccggggagtttcgtgttaatgcacagcaaaagaccctggatatctggctgatttataaatgtatccactgcaatacgacctggaacagcaccatctattcccgtgtttctccgcagaggataggaacaaacctgcttgagcggtttcacaacaatgaggagtccctggccatgcagtatgcgatggatgtttctcttttacatagaaatggtgtggaaatcaaaatgccagcctatgtgatcgctggggaagacgtttctttggaaaagccggtaagtattaaaattcaaagcaaatatctgttaccattgaaattatcttccattttgcggacgaaacttggtcttacgcagcgtgaatttgataccctcgtcttaaaacaccgtattacgggcaacatcggacaggagttgagaaaatgcagattatcttccagggagaccatcattacgatttctaattgacttgatacgcaaaatgccagagctgagttttggaaaatcaataattctaaaaatatggaggaaactatgtttgatattagaaaaatacaagagaatgtaatttatgaagcagtcaaagccaaaagcaatgacaggacagccaatgaagtagtgtatggtaagggaaagcaggggagggcagagaagaatcctgactgggtgaaatcttcgatgcgccgcctggagagcagctttgatgacgagacagtgaaagaaatacggatgaactgccaatgtggctacggaatggacgaaaaactcgcacttgtaaaggaattgttgtctgccgcctcgaacttggaggagtttgtaagttcagagaaagcaaagactgccggacttttcagcaatgacggggaactttttctgcagtttaagttctgcccctgccctatgcttgcggaagtgaagaaattagagacgaatacctggtgccagtgtaccaccggctacagtaaagtcctttttgagaaagcgtttgcctgtgatgcggatgtggaattactgaaaagcataaagatgggagatgaggtatgcctgatgaggattacgctccataaccctgtctggcagtcaggaacccggcagtaaacagtttggcagccgtcaaatgtacatacaagcatgtctgcctggcctgttgcctgcggaaataaaacagcacgaaatgtcatgcgaatcttttggtgatctgatagtatagtgtgaagctaaaatcagaaatgagggatcataagatggaaaaagcaatggttcaattctatgaacacacaggaagcagctaccaaataggttatcagcttggcaaaagggctgtgtcttatccaaactttctaaacctgcaaaagaatgataaggaattgttttccgacgggcagatgtctcagatgaatgaattgttcaaccgttactgccccggccttagtgatgaattgcagggattcgcagatgcggttgaagtcttgccaaaccagttgtattattatgcggggacttaccttgttcctggctgttccctgcttgccgtattgccgggacgaacgaaagacggccatgtgctggtggcccggaattatgagttttcccataaaatggacgacctttccttcgggaaaacccatgtggatggcagatacgcgcatatgggcagcagctccatgctatttggccgcagcgagggcatcaatgaatgtgggcttatggttggacagacctcctgtggtatgcccgtcggcaattttgcgccaatgcgtaaatctgcggttacaggactccagttttgggcagtgatacgttccctgcttgaaaactgcaaagatgttgacgaggcgttagaagctgcattggatatgccggttgcatataacatcaacctgttgatggcagataagactggaaaagcagtcttgcttgaatcctatgatggagtaaaagactggaaaatgattgacgctgcctcggacggtcaatatctgcattccaccaaccatgcgcacctgccccgaatgatgcagctttccccaatggcaatggagcattcggcacaccgctatgcgcttatcaggaaatatatggaggaaagaaatgaacttactgcagcagacttaaagtcgctgctgctggcagaataccccaatggattatgctgccgttggtatgaggaattttttggcacggttagaagcatggtctttgatgtgactgccgggacggtggagctgtgctggggcggtcttgccgggaatgggtggacagcctatagcctggagcaggatttaccattgcaaagctctgagatctatattaaaatagagcatcccacctttgatttttgtaaattagtttaagagaggggatctgttcatggttttgaataggtacaggagaggaaaagatatggaatatctggaagcatttgaacgggcaattatttatatggaaagccacttaaatgagcaaattactgttcatgaggtggctaaggcctccgggtattcctactatcattttacccgcattttccagtctgtgcttggagagagtatcggcaattatattcaaaagcgccgtttgtctgccgctgcgcagaagctgctttacagcgacagtaaaattattgatattgccatagaaagtggattcgattccgcggaagcgttcagccgtgcatttaaagcagtgtaccaggtgagtcctacggtctaccggcgcaatcggcttgatgtttttctcggcaataaaaaagcgattgaccgggattttctccgccatatctccgcgaacctgaccgtgcagcctaaagtgaaacagacagaggagatttatgtggctggtatacagggtgctgctgcgcttaacaatatttattctctgtggaaacaatttggggagatacaaaaccgtatacccaacaggcatccatcaaacagaactttcggcatctgtgaatatcaagaggatgcggatgctgcaaattatgatatggaactcaccgaggtgataggcgttcaggttacttcctgcgataatctgcctgccggtctgacggccaaaacaattccggcggggaaatttgctgtgttcactcataagggaccccttagcgggattttaaaaacctatcagtatatttgggggacatgggctttgttgaccgatgaaaccattgataaccgggatgattttgaactttatgatgagcgttttttaggacggaataacgaccaatcggaagttgatatctatatccccatatgctagggcagaagccacagagcggacaggaattgatcctagattttgtaatttaaagcaagaggaactcttttttgtttctcttgcttttctctttccaaataagatgggtaaaatgatgaacagattattgaaaaagaatcaaaaagctttataagtaactctcgctgccgttccccacagactgattgcgcagctccatcctggtggctaagagttccatttgataaattttgtagaaactgcattttcgttttatgaaaaaccgcaaaaagtatcatgcacaatgctactatggcccgtaaaatagaaacaggttattactctaaatgaagggaggttgttgctgtatgatgaaaagcatttaccttttgagccggcagggaaatatcaggacgtacaagtcaaactgtgcgcttcttattttgtgagacagggcagattgtaactattcagccatgcatattaaatcaatccatatggaggggaatcatgcagtatagaatctgtaaaaaaaacacgatccgggtggtcggcgtaaaaataccactcgtggaagaacacgaggtaaatatgctcctcatcctaagattttggcagcggaccattgggacaatgcagtttcagcaaatctgtgatatggcggagctggaaccttatgggctccttggtatcagcgcctattttgacccgcagcatatttactattatatagcagcggccacaaaccagcctgtgcccccaggaatggaagaatttttgatacctgcggcagtctggtgtgtggtaacagccaacccatgctgccatgtgacttccgatgacatgttccggtatctgcatttagaagtgcttccatcatcaggactttcttatgcagagctgcctgatatagaggtatattccacaaatagcgggggcatggggatgccgattcaggaggcatggtttgcagtcagtccgtctgaacaataaaaaccgcaaaaagtatcatgaatggggaacgctcctttgatatgctgatacagcgtaaataatgaagagaaaatcaaaggagaaaaacgaatggacaaaaccactaaaacagcagggggaaaccctcttgcaactgaaccggtcagcaggctgctcgtgaaatttgcagtcccgtctgtcttatccatgctggtggatgcactttataacattgtagaccagatttttatcggccgcggcgtggggtatctcggtattgccgcaaccacagtgacgttccccttcgtgacgattattttatccatcgccaccctgttggggatcggcggcagcgtctatacttccatgaatttaggcgcagggaagggggaggaggcagaaaaaacgctgggcgccgtgttgaccctgtctgtcataaccggcatcctgtttacggctgtctgccttgtttttttagaacccctggcaatggctttcggcgcaacgaagggcgtgcagggatcgcttccctatgtgcttgattatgctcctattattttatttggcgcgccttttagtatggcagcaatcgcgctgtccagcatggccagggcagatggaagccccatccttgctatgggatgcttcctggtgggaacggtcatcaacctgatactggatcctatttatatctttgttttaggatggggagtgaagggtgcagccgttgctactgtgacctcgcagatcctatccgccgttattctgctggcttattttttaaagaagggacgcatgcgtttaaaaaggaaaaatctctgcccggcgttacctgtctgcggtcagatagttatgtttggacttcctgcctgcatgattcaggtggcggcgacgcttctgcagatagaactgaataaagcagtcgtgcgctgtggaacctcaagtgtgggcagtgaagcagcactcagcaattttggcattgtgcttcggatcagctctgtggtggtatccatctgcgtagggatatcgcttggtatgcagccgatcatcggattcaacaaaggcgctggtttggaacgccgggtaaaagagacctataaaaaagcagtcgtcgccgccactgttgtctctgtcattgggtggctgggctgtgagctgttcccagggggaatcctacggatttttggaatggatgagcctgcctatatggaatttggcatacggtgcatgcgtatttttctgtttggcatggtcgttgcgggatttcaagtggtgtcgtcccagtattacctggcaaccggacaggccataaaagcgatgctgctttccatcctccgcccgctcctattgatgatccccctgatacatcttttctccggcatctgggggctggacggtatcttgtacgcaggtcccacggcagacttcctcacttcatttctggttgcgggattgattgcctatgacagtaaaagtaagaaaaaaggagtgtaaacagatggcagatattatggtacatggacttacccaaaacaatttgaagcatgtcactttccagattccgaaggaaaaaatcacggtgtttaccggggtgtccggttccggcaaatccagcattgtctttgacaccatcgccgcggaatcccagcggcagatgaacgccacctatccggcatttgtacgttccaggctgccgaaatacccaaaaccggcggtggagcgcatggataacttaacaccatccgttgtggtggaccagtctcccttaggcggcaatgcccgttccacggtgggcaccatcagcgggctgtatgccagtatgcggctgctgttttccagaatcggacagccctatgtgggtacggcgtcgtatttttctttcaatgaccccaacgggatgtgcaagacctgttccggccttgggaagattacaaaagtagacatagaaggaatcttagatatggataaatcctggaatgagggctgtgtgaaggattccctgtaccgcgtgggttcctggtattggaagcagtatgcccagtccggactgtttgacctggataagccagtcaaggattatacgaaagaggaatataatcttcttttgtacggatccagggatggcaagggggaaccagaaaatccgaaagtgaccgggctgtatcacaaatatacaaaaactcttttaaaccgggatatcagtaacaaaagcagacacacgaaggagaaatcacagaatttggttgcggaaatggaatgtagtgactgtcatgggaaacggctgaatgagacagctttaaactgtaggataaacgggtattccattgctgacatgtgcggtatggagctgacgcttttgcgggaagtcctgacacaggttacagaccagacagtggggatgctggtgcagaccatcatagagggactggaccggatgatagagatcggcctgccctaccttcatctgaaccgggaaacgccgtccctctccggcggggaagcccagcggctgaagctggtccggtacatgggaagcagcctgactgggatgacttatatctttgacgaaccaagcgccgggatgcatcccagggatgtttaccgtatgaacaacctgctccggaaactccgggacaagggaaatacggtacttgtggtggagcatgacaaggacgtgatttccattgcagaccatgtgattgacgtggggcctctggcggggcagaagggcggggagattgttttttcgggcagctatccacaattgctccaatctgatactttgacgggaaaagccatgcgaaagactttcccggtgaagcaggaaccccgtaagccgatgggcagcctgccggtgcgggacgcctgtcttcataacttaaagcatgtagatgtggacatccctctgggaatcatgaccgttgtgaccggcgtggccggttcgggaaagagcaccctcatttcccaggtatttgccagacagtacgaaagtgaggttgtgatggtggatcagggacccatcacagccaccaaccgttctacgccggcttcctacctggggttctttgacgacatcaggaagctcatggcgcaggagagcggcaggccggaaagcctgttcagctttaactccgccggagcctgcccggtctgtgggggaaaaggcgtcattgtgaccgagcttgcttttatggatccgattgtcacggaatgcgaggcctgcggcggcgtgcggtataacgaggaggcgcttgcctgcacctataaggggaagaacatcgttgaacttctggggctgacggcttcccaggcgatggaggtttttgaggatgccaagatcaggaaacgcctgaaagtgctggagcaggtggggctatcctatctgacgctggggcagccattgagcacgctgtccgggggagagcggcagagacttaagctggcaaagaacctggggaagaaaggcagtattattgttatggacgagcctaccacaggactccatatgtctgatatagaaaaactattaaagctgtttgacatgattgtatcccgcaggaacaccctggtggtgattgaacacaatctggatgtgatgaaacaggcagactggattattgacattggaccagatggagggaagaacgggggagaggtggtatttacagggacgccagcggacatgttaaaaaatgcaaaaacactgacggccgactgcctgcgtgcatcctgttccgataagaaggagtaaaaataattatatcattgtgcataaatgactgcctatagttatgataagataaacctgatagtatgaaagaactaatcagattaaaacacatttccgtagacaagcgggatattttacagcgtatgttcttcgatgtcaatacgaaattacaatcgtgtttgtataaagtatgtttggaaatagcagtttagcttgtatgaactgttacatttggaaacattcccctgctgaacagatggaataaaaatgatagaatagggtatccaacctatccaaacagaacgctaaaaaagaggaaatgccttgataaataagttataatggacaaaggaagaaaggggcagatatatggagtggaatgaaaaattgcagaggattgtggactatatagaaaaccatctgcagagaaaacaggagccagtcaatcctaaggaagtctcagaaattgccgggtgttcctttggttttttccaaaaggtattctcatacatgaatggtgtcagtttttcagagtacatccgttccagaaaactcactttggccggctatgatttaaaaagtacggaaaagagggtggttgatatcagctatcaatatggctatgattcacccacatcctttacgaaggcattccagcagtttcatggcgtgacgccgaaggaggcacggagcaggggcacgaagttacgggtggtgcccaaaatgaacattttagcaaagcagcaatatttctggcggctggaacaaaagccggctttccggctgctcggaaagagtatccggtgtgcggatggggagcagtatgagaaaataccgaagttctggaatgactgccaggaaaatggcacattctccatgctggccgccatggatgaagggacgccgggcgggatgtttggtttgtataactgtgagaagtcctgtccaaaggaaatagaatattccatcatggtaatctcagacaaagaggttcctaagggataccgtgagatccagatacccgatgccttatgggcggtatttgactgcagaggggcagtgccccaggcaatccaaaatggctggaagtacctgcaggaggaatggcttacgaaatatccgtttgggcatgcacaatgcccggaactggaatggtacagccacggtaattctgatgatgaagattaccttagccagatatggataccagtcatagatgaagcatagtacatgagaaaataaaaatcaggaggacaaatacatggagttaccttttcgtatcgtaaataaagacagcttccgggttgtcggtcaccggatcaaaacaacaaaccagaaaggggaagggagaaagcagattccgctgcattgggctaatatccgggaaaaccatctggaatcctctttattagaattagcagatccgggacatgacggattgttcggcatcaatatttataatacagaccctgcagattccaggaaatttgagtatatcgtagctgtcccaagtgactgtgaggtgccggatggactttccgaatatacggttccagccatgacctgggcggtgttcccatgcactcaggataccatcgggaaaaccgaaagcctggcaatcaccaaatggctgccaaaatcaaaatacagaccgttaaataaaggctatattaccggcaggatgaaatccggggcgccggacatggaatattacgggaaagatggtcaggctgaggtctgggttgcagtaagggaaaaataaaaagactttggaaagttgacggaggtatacagtattatggataagaaaatagcgtttgatgattttatcgcttcggtccctgttgagaaccaggattttgtaaaggagttacataacagattaaaggaacttggctgcaagatagagattaagttagcgaaaagcgggtacatggtttcttacgtttataataagaagacagtggcaaattatgtgttccgcagaaaggggatgcttgtccggatttatggggtacatgtaggtgagtatgaaaatgttctggaaaccctgccggatgagatgatccgggaaattcaaaaggcgccaatctgtaagcgtctggcagacccgacagcctgcaaccccaaatgctctatggggtatgacttttggttaaagggagagcactatcaaaagtgccgtaacagcgcatttctatttttggtatgtccccaaaaccatccattcatccaatcgctgttattaaaggaagtaaaagagtgggagaaatccaacttaaattaaaggatatgggagaagcgaaagagggggggggctgcacctatatggcaggagcagaggcagaatatggaacgactgcggaaggggattctgtctttgaacttcctgcaacagaatatcttgtttgtgggcttgaagcggaaaacttcgaggagttaacaaattctactgtttataaagtccagacattcatggaacggtgaatgaaaaagcataaattgactacaagcagctagaagttttaagaatatcttccataacctgatttgctactctaaagaaaattttttagaaggagcgcattatacgaagtatgtaggtttaatgagtagatgtgccacattacaaagtggtacatctattttttacaactaggaaacatctgacaaatgtcatatacagacccttgaattcaggacacttctcactgaacccggaaaagtgaacatgttagaatgaggatattaaacagctgtagctaaaaactgtgtctcttggcttcttttttgtccacaggaatcgtcgtagtgcttcttagtgcaatatattacaagaaaaaagatgccaagatggtatgatgacacaatcgatgctggttcacaaagtatgttattgccgcatagacaatcttgacaaaactaatataattagttaatatgatactataaatagttttggaggatgtgttatggcaagagcgggtcttgagaaaaatattgtaatagaaaaagcggctcaattagcaaacagtatggggctggaatcagttacattgaaaaaactggcgtccagtttaaatgtccagcctccatccctgtataaccatattaaggggatagacgatctgcaaaaggaattgatgttatatggctggcgacaaatggaagaacggatgctggaggctgcggcgggcgttagtgggtatgacgcatgggaggcgatttgcagagcattctataggtacgcaacagaaaaccccggagtgttcagtgccatgctctggtacaacaaataccagagctgcgaagcgaggaaggctacggaaaggttgttctcgctctgctcaaaaatcacatcttcgctaaacatttcaaaagaagactgcagtcacctgatccgcaccttccgggcgtttttagaggggttttccttattagtcaacaaccatgcgtttggtcactctctgtcggtagaggagagtttcagcttttccttgaaggtgctgattgcaggcatgaaggaattggaagaagccgggaatggataaattagcgtatattgagttgtagaataaaattaaaataagggattattatgagtaaaagggagtttggcagtggagtaaaacgagatgggtttgctgatcagccccatcaactaaatgaatttagaagatttcacggtatgacatcctggtaggagaaacagattgccataatgaatcgttaaaatgtcgttttttatcaagacaagaaatatcttctatgataaaataactgactaatatgaaagagatagaagaatcggtatctgtgcttaatgacagcgtaatttggaggaggaatattttatgggtgatttcatgaatggcgttttcccttttgtaataattgtgatatgtatcgcaattatcgttgttcattaccataaaaaggacaaaaaagagaaggacagggattatttagttgaggggatgtgtctaggcatgtgtattggagttgcagtgtcaacttcaatgcatttcaatatggggatagggatcagtcttggtatgctggtcggtgaaacgattggtattctggtgaaaaaggaataaagcggagttttggagggagaaatctatgaaaatattatatatagtattgtatgtaatggcaattggcttttgcattgctggctttctgggacattcagcagcatgggctgcggctgctgtaagtttttttgcaggtagcatggttattatcggtcaacgaaagaggaaagatactgaagtttaaacaagcagatcatccacccctcttagctttatagtgacagcggcatgacaaatgtaagcattttctgacaggacaattttttatggaaattgtacaataggtttaaaatggatttgcactcagcatcagtaaaactatatacatagaaaaaaaggtggaaacatggaatggctgcagcgaattaatcaatcaatcaatcgattatatggaaaatcatttaatggatgagttaaatgttgagaatgtatcaaatcaggtatttgcatcaaaatctaatttccagcgggtattccatttggtaaccggggtaacaattggtgagtatatccgcaaccggcggttaagcttagccgggcaggatattctggcttcggacagcagaatagttgatatagctttaaagtaccattatgacacttcagaaagtttttcaaaagctttctcgcgttttcatggagttgcgccttccgatgttagaacgtctggtgccgtgcttaagtttttttatccccttgctatcaatatctctgtacaaggcggattcaacagggcgaaccaatgggttgaggagttttgctggagtcatattgagggtaaaaatagcaaaggactgacggatgccgggaagtatcaggagattgtcagctgggcgggaaaggccagaggaaagaatccgggtgtttttgatgcgctgacggaatggctgttggatgattttgaatggagcgaggataaactcactgaaaatgaacaaatactcatgcagggcgtattcgtccgttttcatgaacagaacagacagcttcgccgatacttgtctgaattaaaatcgtcgggggtggtcaacgaagcggtgtttaaagccttggatcaatttgatgacgaactgtcaggcctggttcatgataagcaaatacaaaaagtagtgacgcaagtatttgcagatttttctattatgacacagcgcagtgtaagagagctgattgcaggcagcaaaacaggccctacgggtacggatcatgcagatttatatggctttatcaattatctgaaagaccgtgacgcagaggtgcaatgggcgctgcttatgcctgataaggtgaaaagacagcaaagcggcttcaaggtagaaaactaccaatacaaaaaaatgcccggtatacgttttatcggccgggaaagcggcactttgaccagcaggaaagccagagctgagatgttccgtggtctggatgccataagcggttaccggtccggctttgactatgatgtcctgctcatgcaccatgatggaatgtacatagatgtggagccgttgcacagcttttgggggcggtttatgagggcggataccccggtaccggaaggttttctctattttgattttataccatatcataatggaaaggcaggaccgccatatatctctcaatttgcatttgcagaattttcaggggactacgaggctatgcataaacaggaaggctatgacaggaacgccatgtatgatgttaccagaaacatgatgctcagccagggtgtaacgattccttatccggataaatactggacagcagaagtgttcttaaatggatatgataaaggcggaatggcgtatatgttcagtgcaaagctgcctgatacatccagcatgtccaattagaacttgtaaaggagaaaaatgatggaaaaatatgagtacaaaacgcttacatatgataccaaaggcttttggggaggctctgttgatgtggggcaattccaaaatgaactaaacgtcctcggtaatgatggatgggagttggtaagtagtatttcaacaacgcaaagctatggttcatctaaaagcattgtttgtatatttaaacgaaagaaagagtgaaattccagcttaaagagctgaaaaatcttgaatttgattaggaggaaacaaagatgataccagcaggtgcaattaggcgaaataccattatccatgcatttcttgacgcaggtgcagtttcgggagatactgcaaagaccttaaaggaagttggcgtcataaaaggattaggcataaaatttgagcagttgataaatcggggcatacttgtttcttgtgagaatgagaaatattatgtagacaaaagcaaattgtaacagcttgtggaatgaaaaagcacttaaataagtcaatttgaaggaggtttactatggacatcacactaaatcctggaacctatcagatttcttctttgcgaaccagccgttttgctatggcggcggaaacaaaaacaaaggtgtctcccacttctgatagcgaccaattaatcatatcccgggagggacgcgatagcctggaagccctggctgacaaaacagcaactcaactcaccgccatgactaaggaagattttttgaatcaggtcagacaatgggaaagtgaaaaccagaccaggctggagattgacccataccgggaagctgatcccgatggttccatcgcccgtaagacctactttgagtcctacttgggacagttaatagatatggagaacaccataaaggggtactatgccggcgcttatgaggaggctgtgtccgggccgattgacagtttggcttttatttctggaaaatacttgtgtacctggtcggattattttgattctggaatgccagccaaggagcggcagtggacacattcccagctttgggctatgctgacggatacccatgtggcgttgaacgatccctacgctttagcctcctctggcgggcctaagacagttgagaaaatggacgagattgcccggcaggcagtaaaggataaattggatggccttatcaagcagtgacaactcccagttgatcgggctgttacgggtggcaataccttttatttgtattttaaaaaccacaatgtggtgtttcaatgatgttttcatcggaagcagtatctctcggtattatgaatacaaagcttgtcctggtttatttccgtaaaaaaccctacatcataccaccaatgtcggcgaaactgatataaaagagaggtatcttaattttaaactgatgaaaggggcagcttgttatgaacataatgattaaaggagccaggcaaaataacctgaaaaatatagatctggagataccaaagaataagctgattgtctttaccggattatcgggcagcggaaaatcaacactggctatggaaacgttacagagggaatgtcaaagacagtacatggaatccatgggaatgacactggaaataggttcaagacccgcagtggattctattaagggactttctccggcaatttctataaatcagacaaatacaaatcgaaatccccgttccacggtaggcactgttactgaaatttcaccatatttaagagtattgttctcgaaatcaggtgaaagaccctgtccgcattgtggaaagaccgttatgccagactatgcaggagagacagaagaaatatatgcggagatgcctgatctcacggaagattctgctgaactatatgaacagatgatttcctgcccccattgcgggaaaagcatcatggagctgacagccagccatttctcgtataataaaccagccggggcctgccctgcctgtaaaggcacgggtgtcataagtgttcccgatttagcgctcctgattgatgagtccaaaagtatcggtgaatttgcaatacagggttgggatcaggcatatgtagatcggtatggagcatctatagtgaatgcttctaagtattatggctttgattttgatataaccgcacctatttcagaatataaggaagccgcgaaggatttattgctctatggtgttttcagcaagcagtttatccggcatttcccagataagaaaccgcctaaaacggttccggaggggcgttatgagggggtcgtcacaaatcttatgcgtcgttatggcgaaaaaaattctttcagcgccaaacagcggattgaaaaatatttgatacagaggggatgtccggaatgtaatggtattcgtttccgtgctgaaatccttgatgttaaggttgcagggaaatgtattacggatgtgctgtcgatgccgctaactgatttagcagaatggctaaatcagttgaatgaacagatgtctgccgaggcaagggctgtggtgcagacagtcctggaggatttgcttcaccgtgttggccgtattcttgatgttggagccggttatctttgcctgaaccagcaaagtaactcattatccgcaggcgaaatccagagaataaagctggcttctattttagggagtaacttaacaggtgtgctatatatactggatgagccatctgccggcctccatggcagagacacggaaaaaatcattctcgctctgcgtcagcttcgtgatatggggaataccgttattgtcattgaacatgatcttgatattatcagagcagtagaccatattgttgattttggccctggcgcaggaagaaatggagggcgtattatcgcagaaggaacagcggcagaaatcatacaatgcccggaatcagtaacaggcaagtatttaagcgggcagggagcctctatatccagaataaaatcctgtggtaatgggcataaaatccatatttgtaatgccacaaccaataatttaaaaaatctcacgttagacataccgcttggcagatttgtaacggtaacaggtgtttccggagcaggaaaatccagtttagtatttggagagctggccgaggcggctgatgcctggttcagccagcctgcgaggaaccatcgtgaaaacttcaaaggattcgggcatcttgatagtgttatcataattggaccgacagccattggccgttctcctcggtcaaatgcggcaacttacacggatattttttcagatatcaggaacctgtatgcctctctttctaaaagacaaaagattggtttacaagcgaaagatttttcctataatgtgcctggcggaaggtgtgagaaatgccagggtgccgggaaactaactatttccatgaattttcttcccgatgtggaagttgtctgcccactctgccatggaaaacggtatcaaaaccgagttttgtccgtaacctacaaaagccacagcattgcggatgtacttgcgttaagtatagatgaagcggcactcctgttcaaagaagagaaggaaatttggagaaagttaaaggtgcttcaagatgttggccttggatacctgggtctggggcaatcggcggcaacactttccggcggagaagcgcaaagacttaaactggcaaaagaattggcaaaaccgacaggaaatcatattctatatctctttgatgaaccgacctgtgggcttcatccaaaagacgcaaatcatttaatcggcgtatttcagcgtcttgtaaaaatgggaaacagcgtaattgtgattgaacataatccggaagttatcttgtcctcggattgggtgattgaccttggaccggaaggaggaaattacggcggaaatatcattgtacaggggacacctgaaacagtaattaattgtgagacatctgcaacagggaaaatattgaaaaaatttgtcaggagcgcggcagacacgccctctttataactccacaaatactttctggcgaaaaaacactccactataacaccagacttaaactgtgaagtataataaagggtgctgtcacaatcctctgctccgggagcgcggtaaaatgcttcaagtgggaatgaaaagctccataaaacggtttgaccagtggttttgacggcggtaccttaaaaccactggacattataattcaatctgcattattgatattaggcggcctgtatgttccatggaaaagcaggataaatatgacaaacagttgtcatattatgtttgttattatagaagaaaaaatggagatgcattatgcaggagtacacaagtaaagaggcttggttaaggaaatagaaaagacatcagctcagtttattcaggagtttgatgacatagcggatagtgatagcaatttaagaatggagggcgtggacagaacgccccgtgaaatgattgcctaccagcttggctggatgggcctcattcgcggttgggatagcgatgaactggcagggaaagaagtgattacccctgcgccgggatataaatggaatcagatgggggcgatatatgagggcttttacgccgcctatggaacgcagagcctttcagaattaaagcaaatgtataagaatactgtcaccgccctgcttgtctggctgcaaggcttttcagctgatgagctttttcaaccgggagggcggaaatgggcgcaatccactccgtctaattggcctatttggaaatgggtacatatcaatacagccgcccccttcaagactttccggagtaaaatccgcaagtggaagaagctgcgcgcagaattttgaaattacttacttgagaccgtccttttttgagaaggcgcgtttaacaaatccaggttgtcgaactgaaaaaatttgaatttgagaagatgagatgataacaggatattattgtacaaatattttttctgaacaagcgaaagaattgataggtttctatagagatgtattagaaataccttttattaagacagacgtagatgagtccaatggagtttatcttggctttttagaaaacgcaccaacgctttgtatatgggattgtaaagtattcaatgcagagccgacgggacatcaatcatttgtttttcaaacagatgatttagatttaacgatggaatgtttgaagaaaaaaggggttgctctgtcagaagcgattagatatgattggggaacttatgaagttcgcttaaatgatattgatggaaatgaaattgtaataatagagtttgtgaaaattacaaatccataccaatagaccactcattcttaaaatataaaaaagaacttatcgactatggctatcaagttggaaaaatctcaatgaaagagcagaccgttattttcaataagattaactggtaaattttagtgaaaaaatgaaacaggtaaaatatgctttcaaataaaatgttgttatcgattagagtaaggattgctgtgttagaggtacctggattgtatactccctggcaccttgcagctcatcggaaaggtatggccgtaattatggatattgtagaaccaaagaagctcatccttattctttcatataataattgtgaaatatactgttgccatttggatggatataagacagacagggatgctctgcttaaccgtatgtcagaaattgaaacggtatttttatcaaaacctgcccagaacaaatatcgaatatggtataacatagacgaaaatcatctggataaagatgctttgaagttagtagcggaaagtatttcacgttataaagaacatatatgcaaaattgcatttatcgggctgcgtggatttaaacaaaaaaaaattaataaaattctggagcaaattctgaaaggggagtctattacgaaagcatattttcaggatgctcaattggcgaaaggatggcttatttaaaggccagtggtaaacatatgataacaaaatctccgagcggcgcgctcagcccctactactataaaggcggttactttcatggtatccattatggaagttactttgatgattcaaatgccttactctcaatgatggataaggaagaagaattcattctgaaatcgccggaaagacgtaagatcttaatcgatctttatgaaacaaatctgtctaaagaattgatagaaaaaatagctgggcacattgagcgtcttcggccgaatattgtaaagctggcaatcgccagtgattcaaaaagtctgcgtcagctgcggaaagctcttaacaaaaaaacttcgttggcgacaggcgcgctttatctcagcactgatatggaggcggcgaaaacgtggctggtcagtgattaatgcccgtcagagatgagtcaaagccagcaaatataaagggtgtgccgcctgaactgacacagaagcagataactatggtagaaaagggagattctgtatggatgaaagaaagattgtggaattagtagacgcttattttgcttctatctacaattatgtttattttcatctgttaaatcaagggatcacagaaacgatagtctctcagatatttaaaagaatgattgccattggcactgattacagaataaaaaatgaacgattcctgttgtttcaattggcccgggaagaattatgtgcgcaaaaaagtacaggagaagctttggcagcagaattgtccgaagctaaattatcacctgttatgaatcagattttcctggagcttacttgggaagaacgagggcttttatacctggtaaatcaggatatggcagacggggaaatcgcagaaattttatatgtttcaagagccgaattacgttatatggagtcaagccttgcgaaaaaacttgaaaaaatatgccaacagagcgaacaccgtgttctgccagatggggccagtaattgtaaaggagacaaaaagaatggataagatactgcaattttatgaaataatcaaagaggaaatgagtgtaatacttgctacgtcagcggataaaagagttaccatgcggcaggtcagcccagtatattataatagaaacattttgattttcacggatccgggttccctgaaataccagcagctgagagtaaacccaaattgctgcattgctgccggaacgtattttgcagaagccagagctgagtttttgggggcaacgatgctggattccaatgaggaattacggaaggcttactgtgagaaatttccaggtgcatttgacgaaggagtggatcttggtggccgggatgcagaatttattttacttaggccaaataagctaaagggatgggcctttgagaatgacattccgagttctgatggaacgcccacgattccctttgaaatcacgatataaatcgtgtgcctatacgccaaacagggaggtgcgtttgtgagtggaaattccaacaaggtgtcgttaagcgtgaaaaaggcttcaatgatagccgctgcttttgttgctttggtgttaatagcgattgtcactgcatatgggtatataaattccatacagcaggagcataggaaaagggatgaaattgcagatatctttgaaacctatgagccatatggtttagtctatgataaggaaaaagaccggctatactataacggggaacttgtccgctattttgaagatatcgtgaacgcagaccattatttgaaatggcccaaccgggatgggaaggtagatgtttacacgaaaagaaacccgtcaggagcgcttatcagcgtaaacactttccgccagcaggaattttcagaccggacaccatctttagaatctgccatatgcgagctggagatctgtgacctggagacagcaaatacagtcagctgtgacggttatacggcagaagtggaagaaatggtaaaggaacggattgcggaagaatatgaagtctaccagcagtatggcttaacttatgatcaagaacgcgaccgcctatactatggcggagaactggtgggatattttgaagataaacaaatcggccattactttggaccttttgatgatagttcactgaaaatatatgcagttcgggatagagatcataacttatcagggttagatgtcgatgacagcctaaattgataacttcctataatgcaatatccaatgccgcctgtacgcttattaccgataaggttttgtataagaaaggaatattagtaaaatgttgaagtcagataaaagaaaatacagtgtagacttatggattattgctctttcatgctctgtatcgtatgggattatgggcatattttatatgctgctgaaatttgatatggggcagttcccgattctggtacagaccttaattggggcaggatttgaatttggctgtatggggcttgggattacgatagtctgtatccgcaataaagaaagttttgcaagctttggactgaaaaaagaaaaattgttatctactattgcgctgtcagcacttgtttgtctgccgcagtttatttttgacttattaaccagtgataccattacatattttcccttgcagaatgtcaattttacgaaacctattttagcatcgggtttaccggtaaagatcattggtatgctcatcatcatagtaacatgggggttttttgaaggttttacctatgtggtcatgtcagaccgcattaacaaaaggttttcttcttcaagtttattcctgaattggggcgctgttatatgcggaatcttttgtatcgtgattcatcttcttgttgggcaatcctatagtatgataggcgctgtaatcgagtttctattaatatatggaatgctggtcgtttaccgctatacggggaacgcatggggatgtgtgttgattttctgtttcttttggagcgggatcggcctatagaatagcaatttgaggaggataagcagggtgatatatcagtttactacgacaatacataaggatgggaaccgttcttttgcacccataccatttaatgtttgggaagaaaccggacagaaagggaatataccctgccgggttgttataggaacgctttcattcgagtgcaggctgattcccaagggcggcggcgcctattggattcctgtcaacaaaagtattttaactgctctatcgcaggaaaaggatgttgaagtcacgttggagccgatttctcagctgtcacgaatcaaccatgacagcccgtactcaaaagaatgccctgtccgtaaaattgacggcatccagccaattccggttcagccaggcttctgcggacagtgctgtgtggctatgcttgccggggttcaattggatgatgtgatttccgtgatgggaagagggagtgcttcctgggcaaagattttggagacgttggattatttcgggattccttatgccgggaaagcggtctatccaagaggtaaagcttttcagtttccgagatgctgcattgtaaacaacaacaattcttttttactctggtatgaaggtgagtattacggagtacaggacgtggatcaaagtaaaaccattggctatatggaaattttgctgccataagtagtgtcgggtgtgaggttgattgagaaacttccgaaatacgaatagtatgaggtttcgtgaatgaaagaagttgactcccgttaaggagataaagtgttaattgggcatgcccaaatggaaaagagggaatagaatgactgacagaccagatttaagcagagacatggacagtaaaacattccgtgatttttattatctaaaacaggaactggtggacttttgcaggaaaaacggtctgcctgtttctggaggaaagatagaaatagcagacaggattgcctatttcctcgatacgggcgggatacgggctgcttccacagcaaagaaaaaggcggcagccccatctgatattcacgaggacacaaggattgaaccggattttgtgtgtacggaaaagcacagggcatttttcaagtcacaaatcggaaagagtttttcttttaacgtcgtttttcaaaagtggctgaagaataatgcaggcaggacttataaagaagcggttgcagcttactatcagatccttgaggataagaaaaaaggaaaatcgaaaatagagaaacaatttgagtataatacctatatccgcgatttctttgtatacaatcctggcagatcgttagaagatgcaataaagtgctggaaatacaaaaaaagtctgcagggccataaccggtacgaaccatcagatcttattgcaatgagtgatgcgggtggaaaggaaggctgtaatggatgttaggcggtcagtttcttgttagaagtgaagatgtaattgcattgtcgaagtaaaaaaggaatttgtttttgcgtatcttaggcagataaggcgcagatgctgaggaaaagtgagagcgatgaaaaatttattgaaaagagaagagtatcgttttgtatgctctgaggacaaggaatttatagtagcttttgatgctgaaatgaataggctggggtatacctgtaacaaaacaataggtgatggctattgttggggaagaaaaatgataatctacaccaaggcaggagtgaaaagcaaaaaatcatacgccagaatctatatgcgcgagaatgaccttattctccgtatgtatttcagcaacgtggacaagcagaggcagtgcattgaggaatcccccggctatattcaacaagcctttacaagtgattatggagcttgtaagcattgtcataatatgaaagaggacggttcatgcagccataggaaaagctataccctccacggcaagagatatgaattatgtgatggttttgctttttggttcttttctccagacgctgccagaataccagaatatatcaaactgtttctggccttttatcctgaaaaaaagcgaaagtgataaggcgccttattgctggagggcgcattagacgcataagctctgctagggcgtgtttgataattcatgtatgcggctaattgtcccaatttgcgggatatttaccggaagccaggcgccgacaaagcatcgaatttgcggaggaaaagtaatatgaagcgaaagtcagaattaagcattgcaatctgttctattcttgctgtgatatccctttgtggttgtgccgctattgaagacaatgcggttgatctcaaagccggaacaaataacggaattcataatttgaaatctaacgtaatgctccccgacaaggagcaggcgcttactgctgttgatgtgcaagcgacggttggctgtttaaccgttatttatggggacaagccacaaattgaaatcagctcaaaacttgtggaccactcatctatttcttggagtaacgggacgctcatttatcgggatgatcttgcggagcatgaccgtctcttggacgagatcgacagcgaagattgcatgattgccataacccttccaaccaaccttacattgaagacactttccattgagatgggaatcggatcggttgatctacatggcttaacggctgacacctctcttattaccgtcacgggaaaaatcaatcttaacggttttcaaagccaaacgctggaattgaacagcacgttagcggacatcagcgctacggacatttctataaaaaaagaactgtgtctgaactcatacggaagcacagcggccatttcaggcgatatcagaggaaaagtgctgatcgacagtgcagggatcagcaatacagagattgtgtttttgggcgcggacagagatgcctacgccattcagagcacctggaagcctgaaacaggaaacagagaagctaaagagctgctccccgaaaatggaaataccggcattttgattgatggagaacagcacagtctggaatacgcagattccaattccgatgcgccttatcaattggaaatcatttcctgggagcttatgcccatggaaaatattaatctgaaattcacacaaaaggaggataagaaatgaatcaggtatatagtgaaatcagtttgaagacagtggaaaaatttaagcttgcccgatatgttgtgattagcccgaatcctgaaaacgatgcaatggaatatatggagcgatgggcgaaaaacagcgggctgctcgattatcctgattataccccaagaagaatcggctgggatttcccctttgtctccgaagaacagaaagaaagatttgggctgcatggatatgtggcggcgtatatcatcccggaagattttgttccttcctgtgagggagtggaattggctgttcaagagacagaccattatgcggtgatcaccattacagaccctttctcggcgccctgggagaaaatccccggcgcttatggaaaaatctatgaatatgcaaacgcgcataatatggtagctcagagttatgagaaccgcatctgcatggaggagacctatataagagagggcgtcacttatatggatgtttatgtaccagttgatacgcaatagaatccttgttttggcttgctcatgaggttgtttaatttgagtttaccggttggcgctggccccaacaagcctcaaaaagccttgatctatattgggaggggtataaatttttgcatcgaaaaaagggagaaagaaagctgtgtggattgtcattataattttcgttatcattacagcttgggttatatttccgccaagtctaggaaaaatgccattgttttatgatgataacggcaatgttatacccgatagcatttcagaaaaaatatgtattgatatagacggaacagaaattggcctgctcataaccgggaagaacaagtcgaacccagtattgctttttctgggaggagggccaggtattccagagtaccttttagagtaccaatatccatcaaaactagctgacgagtttgtggtgtgttacttagaatatcgggggacatcaatttcttacaattctaatatggtcgctgatgccttaacaacggaatgttatttgtctgatgtaaccgctgtaaccaaatacctaagaaatcggttttcacaagaaaaaatttatattatggggcattcctttggtacgtttattgggattcaggcggcatttgagcaccccgaattttatcaagcctatattgctatgtcccagattgtaaatcaattagaatcagaggtaattgcatatcaatttatgcttgaccaatattgtaaaatgaataatttaaaaatggtcaatgaatttgaaaggtatcaaatcgtttcctctgatagtgcatatagagattattgtgtgtcccccttgcgagataatgctatgcacgatcttggtgtaggcacaacacattctatgaactctgtcatcacaggtatttttttgcctagcttacgatgcagagtttatacaccacttgaaaggattaacatttggcgcggcaagaagtttgcagaaaactctcccgttgggtctgatcgaatgcaatttaacgcttataatgaagtgccatcccttgaaattccgatttatttctttggtggtatttatgactatacctgctgttattctttacagaaaaattattatgaagtaattagagccccattaaagggtttttatacatttgaaaattctgcacatagcccattatgggaagaaccagagcggaccataagaattttaatagaagatgttttaaaagaaacaaatcagttggccgataaacaagaataaacggctaataaacagagttcagtttgacggactgaacaaaaatttgaatttaggagataaataaagatggattatataagggtgacaaaagaaaacattaataaggaacatatttgttgtgcgatttcaaataacaaagatgttcaagtttcttcaaaaaaagattggatgatgagatgctttgatgatggacttgtttttctgaaaagtacagaaagaggtaaatgctttattgagtatattcctgctgaaaatgcctgggttcctattcttgcagaaaattatatgtatattaactgcttttgggtatcaggttcatttaaaggtcatgggtattcaaatgatttattaaatgagtgcataaaagactgtaaagataaagggaaatccggcatttgtattctttcatctgtaaagaagaaaccatttctgtctgacccgaagtttttacattataagggatttaaggttgctgatgaatcagatgtgggaataaatcttatgtaccttccctttgatgaaaagtctaatattccgaagtttaaagatatagcgaagcaccctcatattgaaggagatggatatgttttatattatacaagtcagtgtccgttcaacgggaaatatgtgcctgttattgagaaagctgcgttggaaaacaatattccttttaaggcaattcatgttgaaacgaaagaacaggcgcagctagttccaagtccttgtacaacatatgcaatgttttataatggagaattcttgacgaatgaacagtttaatgacaagaaatttttaaagatggtacaagccaaatagccaaatcccagtttgatgaactgatcaaaatttgaatttaagggaggataaaaaagaaatggattctattgaaaatgcaaataaaagctattttgaatgctttgcttttggcgatagccccgaaatggcggacgaacttttggcgctggtacttaccggaaagaaaactgcaacagtttctgttgtattggaggacgaacagaccccaagtgttggcgatttatcgcttgtactcgatgggcgcggaaatccagcctgtgtgataaagacggtgtatcttgaaactgtcaagttttgcgatttaacttgggacatggtaaaacttgagggtgaggacgaaaactttgaacaatggaagtcgggcaatatacgttattggacacgagacgctgccaagcgcggttatacttttaccgctcaaacacctattacgtttgagcgtttcgaggttgttgaggtgctataacgaaaaaagaggtaacactctgcacaaatgcctttaggagcgacaactcccagtttgacgtactgaacaatatttgaattgattgggttgagaaagtagatgagcaaaaagaaaaattgtgaacggcatggtgattgtaatgcttgcagagcttatcacacaggatctaaacgaaagtgcccatgcgaaagggagaagagtcattcttgggtaaagaataaaaatataggggtagtagaacgtgaacaatcgttcaaaaaaatgtaacgagagcctgaatttgtaagacataaccacggtttgacaaattaccatgcgtgttgcaactattgtttttatcattagtatattttcattgatacgaagagaggagatatttttggctcaagttcttaaacacagcataaaatcttatataaaaatctttttaattggtattttagcagggtgtatttgtcggctggcagattattttcctgcagatactttatggagcttttcttccatccagacgctattcggtttttggatcattacgaatacgctgatcgtcttatatagcacttcaaatatttgtgcagggatcagctcgtttttatatatgtttggcatgacattgagtttttacggcctgcaggctctattgggaatcttcattccaatgttttcagggggctttcgtttttctttatttgtgatgttttctgtgctctctatcccttgtggtattgcagcttttacgctttatttttggaacaaggacactgttttcaattctgtattatattccttgccggtaggagcattggctgcggaaacaatagcgattactatttatttaacaaaatattgcacttttttgtttcaactgctgatggatggtgtggcgatgattgcctttgggatcattttttttaataaggcaaaaagcaaaaaaatttataccggcgcactcatcatcatcactttgattgtttactttgttttatatcatcaagaggtatccatgaggtaaatatgaaaaaatcaaaattaatcacttttattggaggattttatatatttggcggagttattgtattgctatcattgatatttaatggcagccaattaaatactgtattttgtttacctaatattccagactatatagtgaagttattagtaggagttatatatataccattagggtgtttatacattaaaagaataaaggtttcaaattggatagtattagcattagcaataatattcttttgcattagtgctgatttaacaactcaatttagtaagcagccatatatagggaatttagtatattcgctatttgttatagttgttacaatgttaaaaagaaacgaattcacaaaagatatcaggacgatatttgctaacgggcaatagtgaaaattccaggttatcaagttgacgaatatgtggagggaaataggatgaaaagagagtggaaagacatggggttaataaaatggagaaaatagtgaaaacattatccagacaaagtttgatatatattatattggtaatggcggcatgttttgggcttgggattgcggcattatttacagaaagcgattctggaaacatcatgtatgtttttctgcaaaagggatttaccgcttttcctgtcttggcagtcgtcctgacaagatggattacgaaagataaatccccgtggaatttttcactcagagtatggaaacggccagggctgtggctgttcagcgcaattgtaccaggcgttctgattgtatttggtgcttttctttattttgtattgttccctgaaaattatagtggtgcatttgactatggtgctcttttgggactggccggcagcggaaaaggacaaattacatcccctctttctttctctgtggttactattgccattgcagcgctttttatccctattcagcttttggagctgggagaggagattggctggcgcgcttatcttttaccacggcagatcgagcgttacggaataagaaaagcggtccttttaaatagctttttgtggggcatggtacacttccctttgatttattttggctttaattacagcctcaagaatccgctggccccatggagcaatatagcgatgatgttattagtttgtatggtttttggagttatctgctcttatgttgcaatagtaagcggaaattgcatgtattccgccattgtacatggtgtaatcaatataattggtgaagtacctgtttttttatccgtacagcaggaaagcggactgttggggcctaatccatccggaattatcagtatgtcattcatgatcgctgccgctgttatactatttatccggttaggaaaggttaaaaataaacttagtatataaaatgaggagagctaaattgtgaatcataaagagatcattacattggagaatatatctaaaaagtatgataaatgggttctccgggatataaatggatcatttttcacaggggaatccgttgcatttatgggtcacaatggctgtggaaaaagcactttattgaagatcatagcaggtcttgtaaaacctacaggaggattgataaaaagaagggagccattaagtttttcctatgtgcctgagaaatttattccggtggtactttctgcaaggacctatcttcgcaggatgggagaattagacggaattggaaaatgggagctggaggaaatgatagaacagtatgccaaagattttttccttgaagatatgctggatattcctttaaaatccctgtcaaaaggaacactacagaaaattggagtaatacaggcacttcttataaaaagaaaaattttgctgttagatgaacctctgtctggacaggatgaggcgtctcaaggagtttttgtcaataaaataaatgatttgcgtgcacagaatgtaaccatatttacttcctgccatgaacaatggcttgcggatgccatatctgataaggtactgactataaaaaatgggaagctggcgcctgtaatgaaaggcattgattctatctatgtattatatattgaatggggaaacgaagagacagcccccaagataaaatataaggactccagagatgatatttttgatattaagccctatgggaagggctttgtgatacgggtcagtgaaaagaattctcagaaactgattttgcagttgctgcaggctggctggcaattaaaggggatgtatgatgaaaataaacaaaatgttaaaatatcagcttcaaacttattttaggggcagcagctttgtcattccgtttgttattacagctatttttttatatgtgatgtattccatcaaaccattggaaattataagcagcgttctgatatcgggaacatttatgttttttgtgatggtatggattggattgtcagcagcacaaagtgaacagactacagtggagcagcttctttatctgagagcgggtactgctgtttcctactatgcagccaaatttttgtttttactttgcatcgcagttcttctggattgtttctatacattttttcctgtgatacaaaacaaattgaatggcggtgacatgtttacaggaaacttaggcacatttgagattgtaaatgcgtttatactacagttgggaatgacgttttccggtgcagccctggggaatctgtttcacccaagagttctaaaagatagaaagctggcaattgttttaactgtactcgtgtcggttctatccgttaccagacaggcaataacggagatgaatgccatcttcaaatatgtgctgtggatattcccacctgtcacaaaggcttctgaagtttatgggaatgccacggcctttcagattggtcagacaatggggattttttgtgtcatgcttggatatgcggttgtttatggtaccgttaagggcgtaatttgtcacaaacggttattttaatcacttcgggcttgctctattctggatgattgaattttgataacgataaaaacacggcaagcgaaaggaattttattgccgcatgtgaggtgaaatatgaagaatggaatacatatatcattagttatttccattattatctgggcagtcattacggatgcatggaattattctgcattcctgttttcaggtatgccaggtgagtggggcggttatatttatggatccctaagcagacttatctgggcagccccctttctcttattaactgtaaaaaattccagtcatattcaactgacggcaaagagactctttgcttttcatgttcattggaaatcttttctcttgatttttatggcaatgacggtttacgttttagcaggaatgtttgtaaatcacgggggaatttggctgaatccccgaatactgcttgcgcaggagctgcccaaatttctagtagtgggatttgcggaagaaatggtttaccgcggctggggaatgaatgccttttcagcctacatgagttcagataaggctaatttgttttcatccctatactttgttgtactccattttccgtcctattttatacactggtatttggacggaacatttgcgctttccactatgctgacacaagcggtgtacgtattcttattgggtcttgtgtttggatgggtatttaaaaaaagtcaatccatatggccgccaatgctgatccatttctggagcgatttctcgtcagttttgtttattggataatggggcggtgaaaaattgtgtaaccggattaacagattgttggaagaacaataaaaaggtgtgagaggaaggtgttagtattttatatacagatgaacaaataaaagtccctattaacggaacagcccaatacatatcgatacgctctgaaaaggaagatgcgcctctgtttttatatttgcacggcggtccgggagatgcagcacttcctttggtgttgaaattcaataaagagctggaaaaacattttactgtagtcgtgtgggagcagcgcggggcgggaaaatcatattatccatttgcacaaaaccagaaagttacaatcgacacatttatagaagacttgtatcagcttacaatgttcatacgcagtcgctataaccagaaaaaaataattcttgtggggcattcatggggaagtgttttaggacttcgctttatacaaaaatatcccgaatgtatccatacatatataggatgcggacaggtagtaaatatgaaaaaatccagtaggattgcctatcagtttgccatggaacatgccggcggccatgtgaagcgcaagctggaggggattgattgtacttatacaggagatgactggcttagggacttgctttttgtcacaaagcaggtagttaagcacaaaggctctctgtatggaaaacggaattataatgatttgatgatcccattcctgttttcaaaacaatatcatatctcagatttggcaaagcggcaaaaaggtagcctgcagtcaataaaatttctatggcaggagttgatgcagactgattttgagagtatagtacagtttaaatgcccggttgtgtttgtcgaggggagatatgacaagcatgtatcttctgagctggtggaaagttattaccatacgatacaatcagaaaagcaacttatctggtttgagaaatcctgtcattttccgcagtggagtgaaagtcagaaattcaaccagcttgttgctggattattgaaataaaattgaaaggggaacttgtatgaaatacacttgcacagttatatcagtagcagacatcaattctgccagaaaattttatgaggatttatttggcctggaattatatcaggattatggaatcaatgtatcttttacttgtggtttgtctttacagcaagattttaattggctggttgatctaccaaaagaaaacataatgaagaaatccaataatattgaaatatgctttgaagaacaagactttgacggtttcttaaaaaagctgaaagaatacccggatatcgagtatttagggaaagttattgagcatgcctggggtcaacgcgtcattagattttatgatttagatgggcatatcatagaggttggcgaagatatgaaaatggttataaatcgttttcttgtttctgggatgagtatggaagaagtgtctgcaaagatggatgcttctattgaagatttaacaaaattgttgaacagctaaaatgcagtcagtcgaacttaaaatttaaagttgtagaggagaaaatgttctatgaaaagatatgttactttgttgaggggaatcaatataaggggaaaaaataagatatctatggctgaattaaaaaagggctttgcagagcttgattttgccgaggttacgacatatcttaatagtggtaatgttgttttctctagttctattgaggataaaaacaatctcataaataaaattgcattaatgataaaagacagattccgtttagatataccggtttttgttattttgcgggaagaattagaagaactattaaataatgcccctgactggtggggagatgataataaggaaatatacgataatatcatatttattatgccgcctttatcttacgagaagttttatgaggaaatcggcaatccaaaagaggaatatgagaaagtgtatcattacaaaaatgctgttttttggtcatttaaccggaagctttatcaaaagacgaattggtggtcaaagacagccagtgcaaatataagagacaaaattacaataaggacagcaaatacagtcaggaaagtagtgagattgtaaaattcaaggaggagaaaatggattatagaaccaaagcaatcaattgtgtaaaggatactgcattgcctgttcaaatgcagtggtttcaagagtgtaactgcaatttggatacatattgccagaagtatggagaaaccgagtacttctttgcaaaggaaattgaagcggggcatatctatgaaatgggttatccgaaatgtgtatgtccggaagcactggcagaaggaaaagaggcttctttttgtgaatgttccagacagggaatgatctatgttctggaaaacatgatgcctgaaaaacacatagaagtggaaataatcgagacggttttaagtggggctgaaaaatgtagatttaaagttactgttgaatagtacaaccctaattttagggtggaggtcttgttatggggttttggatttttatgctgattatggacttgcttattccatttactatgataggtttcggcaaatcctttttgaaaaatcctccgaaagaaataaatgcagtatttggatatagaacaactatgtctgcgaaaaataaagatacgtggatttttgcccataattattgtggaaaaatatggtttatctgtggcctgatcttgctgcctatatcaattattgtaatggcaatggtgtttggaaagccagaagatactgttggaacggttggcggcgttctctgcggaatccaaatgatacctttgataggttcaattattcctactgaaaaagcgctcagaaaaacttttgataaaaatgggaacaggcagtgaacttgattttgtggaggaaaatgagatggaaaataaaaaagctcttaaactactttacggtggttcttccgttttttgcggcgcaatagcaggtatatgggcatttacagcaaatagatttcaaatatcggaaagccttttggttgtaattggtggcatgatagcgggtataggtcttgggatggtatgccatgggatgagcgtgttggttaaaagataatgtagaatgtcagaaggagtgccgctatgcttgataagatacctgatgcaaaggaaatgaaagctttggttggacagcccttatttgaagtgtggacgaaactgtgtgcagccattgacgaaaattatgatatggaatgtctctggaacagcggaggcaaagcatgggattatgaatacaaatactgcaggggcggtaaaactttgtgtgcgctgtatgcaagagaaaaagccataggctttatgatcatctttggaaaggatgaaagggcaaagtttgaagcagaaagagataactattctgaacaggtccaaaaggtttatgatgaagcgaaaacctaccatgacgggaaatgggtaatgtttgagccagccgatacttctatgtttgacagttttatccggctgttgatgttaaaaagaaagccaaacaaaatataaatccctacaaaaggagacaaaggagactttttaaatgaaagaaagccggatgaaaaaaattattaactttattgagacgaatgtgaatggtaaaacgctgtttacaaaggagttagcttacgacctggaaaatggtgcgctacagggcgtctactcggatcaaatatcattttcaaatttaaaatattcccaaactggattccagctggatatgttcattatctctaacgagaagatatggctcatgggaaaggatgggccgcgggagaagttacggaaagatttcagcggcgtatccctgttccgctttgaattggctaagcgaaaaagcacggatgatattacaggctgcttccggtttatttctgcttcagggaaaaatgtggcagcagaggctatcgtaagcggtatttatgatgtccgtcttgaacatgatgtgttaaagttattggaagatcaagtattgtaccgggatcagccgatacaaggggagcgttttaagcctgttgcatttcagtcagaacatcgtttttacagcaaagacggaaagctgcactatgaatacgatggcaaaagttttgacgtggacacaaaaacgatgcggcgcaacagcagcccggacacctttcctccgtttatctcaatagagaaataaagcatctttgttttgatttgctcacgaggatatcgaattggaagttgataaaaacaagtcatactgatcctgctataataatcacatgaaagaagggggtgtaacttgaattggaaaatctaaacttgaaaaaactaatattcattgttgttctctttgcatttttaacaaatgggtgcggcttatctaatccggaaaataactcgccatctgattcatcaggctccgatacaatgcaaacagcaagtgtagatgaatatactgcggatgaaaatatacgtcatgtcaatataagcgggaatgccagatccattgttatcaagcagagtgtaaatgaaaactttaaattttataatgcagatttgaacaccacccatacatacgatgttcggtgtgacgagaatggagaggtgcttgacatcgacattatgatgggaaatgctgaagctgataataatattcttggctcctttgtcattgacatgccgcagaaagaatttgaaaaagttgaaataactggcgatttcaggagtgtttttcttaacactataaactcggatgtattcattcatgcaaacgattcatctgtagttcttgacttagaggctaattatttggaccacaatatcacgctggatggttcagattcagacgcatttagaggtgtttctgtttatttagataaattgcctgataatgtcagaatggagttaaacgtaattcagggcggtacaataaacgatccgatgaacatactcaagaagaacaggatggaatcaggttctggaaaacctgttataagtgttaacaatacaaaaacaatagaggtctatacaaaagaataagaggaagaatatatcatactatgccatttgtattagggcgacaactgaatttatgcgtaggagggataagagtggttaatatacaagatagagagcattgtccagcattagaagaagttggagagtacatcaataatccggtttttactcagttttgtacagacattaagactaaatataattgtaaagaaaagatagagtttagctcttgcagttgggaatatggttggaatgtaacgtttagaaaggctggaaaaaatctttgtacgatatatcctaaagagggatatttttcagtgttggttgttatcggacaaaaagagaaagaagtggttgagtctatttcgcaagactttaccgcagaattaagagatatttataaacagacaaaaacaggtaatgggcaaaaatggctgatgattgatttagaagataaggagaaaatgtatgcggatatatttcgtctgattgatattcgcagaagataataattccccgtttaccaagctgaaaacttggaattttggaggtaaacctataatagattaacgaaacgcaaagaaaatttttaggaggataatgttgatgataaaggaaatagcgggttttgcttacgactgcaaaaatgcagacgccttggtagatttttatgtagaacttttaggctgggaaaagattttatcaggaaatggttgggcaggcttgcgttctccgcaaggttggatatttgcttttcaagagattgaaggttatgttcctccagtttggccttgggaaacgggtaagcagcagcagatggctcatattgattttctggttgaaaatttggatgaggcagtttcccatgccttaaaatgtggcgccatcaaatcagaaatacagtattttgaaacgtcaacaacaatgtttgaccccgaaggtcatcctttctgtctaagtacagtaaaacaatgattttatctggttcacctaattaatagagagcgcattaaatggataaggtgtactcagtaaatttaggatttggcgggcttgtttcaatctcctggtaaagaacaacattgaaaataaaacgcaatctgttttaggaaggaatagcaaatgaaaaagttaattgtatcctccccatgctttgaagatgggggactcattcctgttaaatatacaggacatggagaagatgtatccccggagttagtattgaacgatttaagtgaaatggcagagtctatcgcaatcatcatggatgatatgggacatcctattccggcatataatcattgggtaatctggaatatacctgccatatctttgattcctgaaaatattccgcatggtgagcgagttgattccttgggcgcaatacaaggatgtggatatggcaagcatcgatatagggggcctaagccaccatttaattggtcacatatttatcactttaatgtattttcgctggattgtcgtcttgatctgccaagaactgccagaaaaaaagatttgctggcggctatgaaaggtcatattttgcaacaatcagtattggccggacactatcgctaaaatgaatttctgtctgtccgacaactcccagcttgtcgggtaaaaaaattggagttcctaaaaggaaagggataatcgtacaatgaaagtggataatgaatttgtagaaaatatagataagttacatacaaccgaactaggcgaagaacgtattaaaagaaatttgtctttacatacaaatgatgtggttgactggtgtaaaactaaaatcacttctgctaatgctactataacacggaatgggaaaaattggtacgttaatatagataactgtatcttaacaataaatgcatatagttatacgattattacggcacataaggcgaagcaatgaaatatacaattcgtgagtcagaagcgttttctgttattggactagaaatagaacttaccaattatcaaaaaagaaacattcaaataagcacacagttttggcgaatatttaacagtaatttaaggaaatcttatctttcacaagcaggaaactggttaaaatacgcttttatggaaaagagaaatggaaaattgttttatttttgctgtattcctaaaaggagtgttgttccagtcaattttatctataaagaaatacagccttataaatatctcgttgtaaagcatattggttctatggataaaatatacgaaacctacggaaaaatatatcaagaaatattgcctaatacggaatatgtgcctatacaagaggactttttacactttgaaagatatgattatcgttttcattggaatagacccaattcagttattgaaatttggttgccgattaaaggttagttaaatcccagtgtgacagactggacgaattagaacttggagaaatagagatgaaaaagaaatggattgttatatgtaatattgtgttattgctttggtattttctttcaatgactgggctgaaattaggagataaatatttggttcaaagtgcattcaaagatgagtggatttttttactgataccaactataacatttgtattgtatttaattacaaggaaaataggtaaagtattacatttgacttggctgggaatgtggtttgtaactcaattttttagtcatgaatggtattcaatatttggtgatggatttatgggagatttagaaggtaaaatggcatactttaaaaattttattcagattactgaaataaatggaaggtatattccagatgtttaccatattgttttacatattttaattatgatagcattcgttgcgacaatcatgtattcaaatgaacagaaaagaaaatgcgcaaaaagctaaatcccagttgatgggactgaaaaatgagtatttaattgagaggagaatttcatctatgtacaagacattagtttccatgctggaaaagccgcctctttactcgaaaaccacaattccattttgggacgatgaacatatatctaaacagatgctcaaagcccatcttgaccccgactttgagggtgcaagcagaaagctttcctttattgagaagtctgtctcctggataagagaaattgtgccttctgcagattacaggcagctgattgacattggctgcggccctggaatctatgccgaaaaatttgcagaagctgggtaccaggtgacaggcattgatttttccaggcgctctattgattatgcgataagttctgcagataagaaaaacgctgatatctgttacttgtgccaaaattacctgcagctggatttaaagaaaactttcgatttcgcaaccatgatttactgtgattatggcgccctgtcaacaactgatagaaagcttcttatgcaaacggtatataactgccttcgtccgggagggaagttcctgttagatgtattctcgaatgttccatatgaaagatttacagaagctcaaacatgggaattttgtgaacatggaagcttttggagtgaagatccgcatatcgcttttcacggaaattataaatatccggataatgctactctggagcatactgcaattgtttcccaaaatacggttcgcaattattatctttggaatacctactttacacaggaagccttaaggaacgaggctgccggcactgggtttaaggtttgtgggatatttggagatatggccggagctgtatacaccgaaaaaagtccgacaattgccatattgttacaaaaataaaggtcctgttttatagagtatagtgaagaagtatgttacaggttcatttggaggagacggaatgtatgaacgaatgttgaataaaaaagaggtaccggctgccgcagatatggcctcatattgcggtgaaactgccaagtggtttacgctgcttaatgaatggataagcgaaaacttcaatacagtacaggaaatcacgttcccttatggcaataagtacggctgggggattgcccatagaaagaagaaaaacctggtctgcaacatttttgcggagaaaaacgcttttacggtaatgatgaggttatccaatgcacagtttgccgcagaatatgccaatgtgaacaagtatacacaggaatatatagatcacaaatatccatgcagtgctggaggctggatccattaccgtgttacatgtaaggagcatttggacgatataaaaaaattattatctgctaaatgctccccgtaatcagacagacatagacatctgcttcactgacagcggcagtgacaaggggcggaggaaaggtacggcagcttctggacaggaaatcttcctaaatcaccgcaaaatgaatacagaatagacggtggatcgatatttgaatggagaatgcttaagctttttggaggaatcaaaattgaagatgagaaatgaatatacatgcccattggaaatgacgcatgatatcatcaaaggaaagtggaagccgattatattatggcagcttagtaaaggcggcaattcgttatctgcattgaaaaagtctattaacgggattagcaagaaaatgttgatccaacatttaaacgaactgctggagtatggagtggttgataaaacgacaggtgacggttacccgttgaaatcagaatataacctcactaaacggggaaaaagattatttgaggcagttgcaattatgcagagcgttggaattgaaatgatgcttgaggataaccgccaggatcttttaaaggataaagggcttttgtagtcacaaaaaagtgactaatttacgattcttctatttcatcttataataagagcagtgacgggaggccgttacatgaaaaaagtatacccaaaagggcatcccgtaactcatgccctgcgggcggtttagcaaaaaagctgctaaacaaagtatgcctgattatagcagtttttgtgctgcccggcacaacagcctgtccccagaataaaagcaacagggaaaatggaaatgaaagcaccgccgatcagcttgtcggatacgctttctggcaagacgaatggctttaatctgcagtccggcaatttgtgccggcaggatattaggattgttgtagggataccagaacggccgcctcccctgtatcacttttgagtccacccggattgagcacaccagtgatggcttgcagccggtaggacgaataccgggtactacataagaaaaaacatgtgaggaggtaagttagttatgacagatccagttaaaacgataggggctatccttgataagcagagcgtggtattcataagctctgtggatgaaaatggttttccaaatacgaaagcaatgctggccccgcgaaaaagagagggtatgaaggtaatttacttccataccaatacatcatctatgcgggtgagacaatttaaaaacaatcccaaagcctgtctgtatttttgtgataaaaggttctttaagggggtcatgctgaccggtacgatggaggttcttgaagaacctacctataaagagatgctctggcaggagggagatacgatgtattatccggaaggcgtgacagatccggattactgtgtgttacgttttaccgccgaacagggacggttttacagtaatttcagttctgaagattttgagattaattaattggttatgagatatataatacgtcgggccgtggtcgctccgacgtattatattgactttatcaactttccggaaacaatgcgtccaatctttcctggtatctctgtgcctgtggcttacgtcttctgaatctcgtcgcgcaacatacgcttgaacgacggctttttctttgccatcgtgcggcaattttccattatgaatgactgaacactgctactgcctgtcaagatatgctttcaatgcaagacccatgaactttgatgcgcctgccccatactttttatcggtcacttggataaatgcaggagatgacgtatatgtttcagccataaactcccaatagttttctcccatgtcaagccctttattgctttcgttaatgcaggccaccaattcgctgacgattttctgaatctctaaagatgtaacatccttacttaaatctgcggtaagttttttggtgagagcttccgtttgttcaatacgactgcctacttctgcttgagaaattgtcgggccgttaggtaaaaaatcttgaaggttctttttcatggcttttgtgtaattttcgagactgccatactgttttatcgccatatcagcaatttcgctttcatgggattttatgtcagctatcatttcatcgaattgctccatgccgccccaccgtttaacgatttcttctgtatgcgtctctttgaaatcagctaacatgcgataatactcgctcatatcaaaatctttaaaatccatacatttttctccttttataagtttttcgagtagccccaataaggcattaagtctatcacgttttatttgtattagctcccattgctttttaaatgccgccaccttatcaaattgagggctatccataattgctttgatttctttcagcgtgaaatcaagttctttgaaaaatagaatctgttgtaacgcctccaatgcacactcatcatacaatctgtatccggcgtcagttacttttgtgggcttaaataagccaatttcgtcataaaattggagagtccgcacgctaacaccggtcaatgacgaaacctgctttacagtcatcatgtcaatttacctcccttccatcattcggaattgagttcaggctaatgtccctctgccagtaacgaaattcaggttagccttatctctgattattacaatacattatcacgttacgtgagtgtcaatactctaatttgatttttccgtaaaatgaatagttaaactctcgattgtaagagtaaattcgtctttcatgattttactcttgcttacctgattctacagcctaaagcaaaaattatttgcctattatgggtttggatgttatattatacgtataatacaaatttatgaaatcgtccggcttatgtctggcgtatggaaggagattcctggagacaggttttttcttgtgcaatttgctctgcatgactgcagagctttttttattgcaaatatttagaaaaggaggagctgaatttgtattaaaatcacaaaaaaggaggtattgtatggaattaaagaaaacttgtaactttatggatgcgcttaatgactgtgaaccagtacctggcagcttatcgtcccttcatcgtcccaaaacacaagttggctattaccgggctgattatgacgggcgccagtggtggacacaatattttaacatccatgacacattaaaaacaaaggctctcatgaaagagagcagagggatcttaaacggtctgctaaccggattccctaatctcacagaactaaaacggttttgcaaggtaggaaatgcagaaaaaatatcggatgtagagtataattgctatgtgaatggaacatacgggaattattggattcgatttattacattggagaaaaactataatatttactgtcatattctatcgaaagaatccgttgactaaaaagtccacctgtatgtgcagctatagcttcacctcagtgtggtaaatagcctatttttctgttataatatgaaaaataaagggcagatttaaaaaaggagctacagatatggataatggtatcatcagactttaccacggatctgaaaatattatagaacagcctctatacggaagagggtcctccaggaatgactatggcaagggcttctactgcacagaaagcatggagcttgcaaaagaatgggcctgctccaagggcagcgacggatttgcaaatgcttatgacctgcagatgacaggattaaaagtattgaggctgaatagacctccatacaatgtattaaactggctggccatattagcggataacagaacctattgggaaaaaaacagcatttcagagaatgccaaaaactatttaaaagagaacttcctgatagatcttgccatttatgatatcattattggttatcgcgcggacgattcttatttcagctttgctaaaaattttgtctcaaatgcaatttcgctgcctcaactccaggaggccatgagacttgggaaacttggagagcagatcgtgctcagaagcgaacaggcctttcgtcaaattacatttatagacgcgacgcctgcagaagcaaatgagtattatgcaaaaaaagcggccagagacagggcagcgcagaaagagtaccgaaaccgtgtaagaagccaatcccacacagatgaattattgatgattgatatcatgagagagggtataaaagatggagatgaacgcttattatgatgggtatgtaacggatgcacaggaaacactgggaaacatgatggattatgcagtgaattcctgcgggaaggatccggatgaaatatttgttatgtttttaaattccggattggcagaacaatttgaaaagggaaaccccagatatgtagcgggtatgtctggtgctgaactggccaaagaggtggtcttaaaagtaacgggacaagagctggaagaaccggaggagtattacctggacaagtctgctgaatattggtgcggttggattttagcatattatcagtggcgtacctgcagaagcttcaggaaaatacatcaaatcatctctatcactgacatcatgaacatgtaccccacacaccatgaagcggatgtggaaaggtttattgagacagtgaacgggatatatacaaagcggcatgataaaacatatctccagcaaatccgggagaatgccggcatgagcagaaaggagctttccgtgcagatcggaattaatgagcaggtaatcgaaaagctggaaagcgattttgatttcatcggaaaggcagacgcttctgtggtattttgcctggcacaggctctcggatgccatatggaggatttgatggaaatatgacaactgtaatttgtttccataagcctgcggaagagtatggttttctcagtaattggtatcctgccaggttccgcttaagtgggataactttttcttccgtagaacaatacatgatgtatattaaggcgcagactttcaacgatgaagtgatgatggtacggatactcgctgaaaagaatccatccaggataaaagcgtatgggaggaacgtccaaaattatgacgacaccgtctggagcaaaaaacgccgccaggttgttttctatgcgaattaagaaaaatttgcgcagaatcctgatttaagggacaaattattagcaaccaaagatgccatccttgcggaatgtgcagtaaacgataaactatggggaattggtctatcaagggagcatccggattgccagcatccggaaaagtggcctggaaagaatctcttgggcgatgtacttatggaagtgagagagaatctaattatataagcagtgaaaagaaggcagccataccttctttttttatgaaataatttattagtaaagaggtaattattatgaactatgaagaatttataacagaggtaacaattgaacttaataaaaggatagcgccggaaattaaacttatcccgcgggagacattaaaaaacaatggtataatatggaaaggtatttcatttgagaacaggtccaggtccggagcaatgcctactatttatctggaatttttctatgaaaattacaaaaaaggatacaatattaatcaaatttgtgataagattatggaattttataacgcattgcctgattgtcctatatgtgagagtgttttttcttttgataaaatcaagaaacagatcgttttcaaattaatcaactatgaaacaaatactgaactgctgaaaaacctcccgcatattccatacctggattttgcaattgtattttatgtagcattggaacccacttcttcggggatatcaaccataaacattacatataatcatcttgctttatggaatatcacgttgtatgaactctattccctggcaaaggagaacactcctaagatactgccggcttgtttagaaccaatggattcgttcgttgctgaattaaatgcaactttggaaccggatgacaaactggatgattcggatttactcgttaacccctcagaaatgtttattatcaccaattctttcatgaattttggtgcttgctgtatcctgtatgatgggctgctaaaagaagttggtgataaactccaaaacaactattttatacttccgagcagtataaatgaagtaatcgtttgtccagaaattcattaccacgatacagaatggctgcagaatatgatacgagaggtaaatgcaacagagttattgccgcatgaaattctatcggatcatccttactactatgacaggagtacagaagcccttgtgctggcttgagattaaactgctttttcgatagtctgattgtatatttcagacattatttaagaaactggattgattttgtatacaccctgacgggtgttttttatttggaggaaaacatatgaaaaccttagaattgaaaagatttggtaaactttatacagtaacattagttccagcttgctatatgaataacagaagccttgccatacagataatgtaccgcgacggtcaggactgggaaccgtatggtacattaaccacaaatttaagtggcatccctgaaaaaaataaggcttatgtagatacgaataatcttggtgcggaaatccttgactggataaaagaaaacgggttgggagaacctactggcaatatgaaaaagtcaggtttttgtcagtacccggaagtgaagtttaatgaggaagtcctcaaacagtttgacagccctgattatgaacagtatctggcaaactttgagactttggaagaaggagaagtctgcttatatccaacttgtgaaatgtgcgggaaagtctatcccacaatagtaacaaagaaacaggctgatatgtatgaggaatatgtacatagcagaaaatatctgatccaggatgttttcccagacatgcccaatgaagtacgcggtttattcgccagtggacaacatatctgcggtacatgttggaaaaatatgtttggcttctttgaggacgaagacgacgaggatgaatatgaggaagaagattttcagtaatagaataattattaactaaaaacagtttaagtattttaaaggcgccctgtatttctaagggcgcttttcgtataaaaggaggatctatatgataaacaatgaaaaaataaagtgtatggacagccactggatagaggtcatggacttagctgaaaagtatggctttatatgccaggcatatggcggtacagcaactttggccactcatgcaaatcagttgaatgcattaggggaagataagtatctgtatatgcaaaaagaaaagttcctcatagatatgtcatcgaccgtagaggattaatctgcatgaatagtaaccaaatgggctttatccgggatatagtgagtggaatctgcattatagcagattcattttttggagtagactatggtgaataaatatgtaaaagaaattcaaggattatgtggccgatattccgaatgggaagtatggggcgattttgtcagcatgtcagctgcagctctggcaaacccttttgatttgcagcaggctccggaaagagagaaagactatctaaaaaggatcaataaatataagaagggggaacaagaaaaattcggcgatatactgggcatggtcgtcatggattttgaaaaatgccctgggcaggatttattgggggaaatatatatggagttaagtattaatagcaagaccaaagcacaatatttcacaccatactatatttctgatatgatgtcgaacatgataattggaaccgatatcaatccggatgaaccccaaatcataaatgagcctgcatgtgggtcaggagcaaatttgattgctgctgcacatacaatgcagaaaaatggatttaattaccagcaaaatgcatattttgtggcacaggacatggattcaatcgcagctaaaatgtgttttatacaaatgtcgttacttggcatgccaggggtggtatttattggtgatacattggcaaaaccgcttcaaggcgatgcctggtatactcctttccatttcttatacggcatacatacactggcccgtagacgtaaaagagagcctctaaatcaaacgattgaggtgcaagggaaaaaggagcctgacaatgaattagatgattgggtatatgaactattaggttttgcgtaaccaacatggaagtaaagaaaaataggagagaatgaataaatatggagaagattagaacaaaaatacaaatcccagatccagataacgagggaaaattcatctataagccaagaaaagtaagtgaagtttttcaagacttgtatgacgctttaaaggattccggtctattgccggatgattactttagcctcgactatgagaatacctatagagggggagtcaacgctgatttccctaccataaacaatatattttgtaacacttcatgggacagcagcgaaggtatatacattgatgtctctatacaggaatatgatgaatcgcaagaatgctacaacctcattccatttgctacgggaaaatcactgggagagactgcagatgatttttttcgaatgcactatatcggcggttacatttacagattgtttatgggtaatggtgctctgcatccccgttacgctcccttaaaaaacaaggatactggtaatgattccaaacagcttatggaacgggtaaatcaagaatttaccgacctaatgaagcagcgcctattctgcagccagaagaatctgtgtgaatatgcaagcgtattggaattagaagcaaaggcgatgaataacctgacacaggaggcgctaccgaaagagagattatcagagttactttctatgccgtatattttagaatatctcagaatggaacagatgtttgaagaatcggacgaatgtattccggaatatttgggcgaaaatgcttctatcggatgcagaagtggaagatgtagctgtggcaatatagtccgcagttatcataatttctgtaatagttgtggtgtcaagctggattgggaaaatgttgtacatatggatggaggcaaggaaattgaagttatataatgcagagaaattagaacagaatagaagagtaataataacgctcaataaaatgctgaatgcattgaaatttgatgatatgtactgtgaatttgcaaatgggaagttatatatgagagatgtcaagagtagatggcaagggagaggtatttatcgttacatcttgcgtgaatgtttgcattttgatgaaaatggtctcattgaaggatttgatatagatcctaagatgttgtcagatttcctgttagatgcagagaactacggtctgaaactcagtaaggaggaacggaaagctattttatagttatttactacaaatttagctttatttgttaaaatcaggagggtgattatattgaaaaaagatgtagttgacgatttattttcaatcgttattaaaagataccaaaatgaaaaaccagatattgttctgtcagagtctatgatggatgccatatggttttcgctttatggaaaattagatcatgaaggaacaaaggcagcttatgattatgcaagaaccggaacattaatagggtaagaagtattaaatttgagctgtcactacggtggcagctctataattatatctgttcataattctataactattcgtgaaatgtctgttttacgaatagttatagactttttcctccagataggctataataaggctaatttcatcgcggtacaactaactatattgaggtgcaaaatccatggagaaaaaaaatatcagctatcatgagaaaaaatatattgataacaacatccgtctccggaatatcctggcggagcttcctccgtatgtacaggatttctgcaggggacgccagacaaccttaagcatgcagacccagatcgcttattgttatgatttaaagatattcttccagtttcttacaactgcaaatccctcgttaaaaaattcagcactccgcagcatttcccttgatgtcatggaaaatcttcgccccacagatattgaggaatttcagaattatctgaaggtatacgaaagcaaaaatacgggggaggcaatgaccaatggcgaaatcggtatttccaggaaaatttctgctctcagaagcctttttgactatctgtataaacatgaaatggtcaataataaccctacccgcattgtggatgttcctaaagttcatgaaaaagccattattcagcttgatcctgatgaaattgccatgattttggatgccatggaggaatttagtggaaatttgacccaccaccaaaaaggctactatttaaagactaagacacgtgatattgctatcataacactctttctcggaactgggctgcgtgtgtctgaatgtgtaggattggatatttctgacgttaactttaaaaacggcggtctccgcgtgatacgaaaaggtggaaatgagaaaattgtttattttggtgaagaggtggaaatagctctgctcaattatctcgaagaaagagaaaacatggagacaaaaccgggccatgaaaacgcacttttcctttcccttcaagggacacgcctgagtgtccgggcaacagagaaaatggtaaaaaaatacacacagccaatcattacaaataaaagaattactcctcataaattgcgctctacatatggcactgccctttacgaggaaaccggtgacatttatcttgtagctgatgttctggggcataaaagcgtttccacaacgcaaaagcactatgcaaagttaaaggattccagacggcgtgcagcagccagcgctgtacggctgagggagaaagaaaatcaatagtaattgttaccccttattgtaagcgttacctggtctcttacttaccaattctactgtttgagtggttttacactgccctcttaagaccctttaaagggctcaagaaggcagttgatagcctatgcatacaaaacgtatttaacccataattaatcaaaacactttattacaatctcgtattccttgtttgttttcaatgattttacaaaaattgaatcattatttccatctatgactatatagtttttctccataaggcttctatcaatgatatcccatatttcttcaatttcagatgtattcatattaattactccttgtcttcttttttgtataactccggccatttcaatgcagaaaaaaggcacagccacacccctttcatcaggatgcggccatgccattattacttgttatcttctattctgataattcaaaagatattctatcagccaggcacaatggaacggtcaactgtttgccttctttagatatacctccctgtgtgtctccacgcaaaaggtaaagataatccagtttatggtcttccaacaagctttttgccgttttgtactcttcctctgtgcttttgacttctataccatagttcttataatctcctaaacttcgcacaaaaaagtccagttctccctgcgtcttttcatagacagcaaaccacggggagattcccgcaatttcatttttgttttcaattcttctgcgtagagttaggtatacaaagttttcagcgagaagaccctttatttcattaaaagtagcccctgtaattttcagaaaatgataggcgattcccatgtccataaagtagtacctgcagttatccttgatctgcttatagtccgcatcaatagattttgatgcatagccgataatatgagattcctgaagccagctaatagcatgatttatcatcttttttgtcatacgtccgctatcactctggtatgcaatcttactcaattcagaagttaaatcacgcacaccctttttttctctaatcatctgcagggcaattgcattaaacagcttctcgaaaagattaatatcagtaatatcagaaaaatagcgttttgattcattgatgaaaacgtccaacagatccttgataatttcatagcatttatcaagatttttatgttctgcaaaggatgccacaacggccggatatccgccaatcttttgatagacgccataatactcatggagtttttgataatcctctgagataccgccaccgaagagatcaattgtcgaatatagctgccgttctccgaagacccccaaaaattcactaaatgttagtgtctccattgtcatacggtcaatatcaccggctggcaggaaaaaatccctttgcactgtttttcccaaatagcttccagtaacaatcacatagcaggtaaattctctggcaaatgtacggatttgattgaaagtttctacagattcctgaatttcgtctatgatgattattgtgtctttgttatcatagaaacttggttcatacaactctattgcccgttgtagtgggtgttccggacgcttttcaccaatcttccaatcagttgcctgagagaggcatcttaaaaaatcctggcccgatggttccgccatattaatatatattacatttttaaaattttcggttgcaaactttttcagaatataagtttttcctacctgccgtgcgccttgcagttctaggacacgtccagtatcctcgtctttccattttaacaacttttcatatatatctctctttagatccatatcactcatcctttattctatactttattatagacagaaattcatacttaataaccacagcgtcattgttacttcattataatatgtaatcatatattttacaaagtatttctctgtcctttgtccctacatacgtcaataaattacctacatagattatccgtttcaaaaagttgtagccgatactcgtacatgcattgtggatcttccggaaaaatattaaacttatctggaataataacccgtaatacaatccttcctgtctcctcatactcatcaagccggatatcacagtcctcaaaaatacccgagacataatcacctgattcaaagcgttctccagcctgtacccgcaggcaaagtgaatttaagatataagctatcagctcatcactgtagcgtagaaccatttgaaaatccatatggttgtacttatccataccatgtgtatgcgcattacatgcatttggaagaaaatcatttacaatgcatccacattcgtcgcagcaaactccatttgcacagcaatgtataatccagtcaattttttgttccataataatctccattccgcgcgccttcgggcgcggcacaaatagtaatgaaagtgtttccaccttcaagttttcgtgttacaatagacttaattataaggcatcccggcatcagtatcagatgcacccacccttttgctgttgatgtgcaggtgcgcctcgttttaccaaggtgggaatactcttaattaggttcacaatgtgagccttctttttgtatccatatcacgattttggcttaatttactttctttcacactaacctccatgttctaatagtagaaaaacgacctatctcaaatgagatggtcgtttttcatgaaccccaatatctacagtgtcaaatttattccgcggtattagcagccggtattaaaatcaaacttggagaacatataaatcggtatcgtatagatattacctctaattcctccatgcgtatttcccttggcaaatatcacataatctgccttatgcttctcaagtaccattttgattgtcttactgctgtttttgccagccttgacctctatggcaaaactttttcgcgtttttattgattccacaaagaaatcaatctctcctgctcctaatgttgcaaaagccggtgtctccaacgctatttgacttggatgcgtaatgcgccttttcagatccagatatacaaaattttcactgactatgccatctatatcatttggcggacaagatattttttgtaaaaaataatttgtaaggccgatatccataaaatagcagcgtgcttttgccctaaagtcaagaatattgcaatccaacaattttcctgcaaaacctataatgccactactgtacagccagttaatggccctgtttacagatgccttggatatgttgctggaataatcctttataataatattctgcagttcttcactgaaactgtcttccttaaatccacgtttttccttggccagtatacgggcaatacttgcaaacatattttcatagacagcatcatccagtatgtcatcaaaataacgtctgctctcattagaaaataattttattattttcaggagcacagtaacgcagtcatcaatagacgcattgtccagatattgaagcactaccgctggatatccaccaatggtcgtatagattttatagtatttttccatctcggcataaacatcttcgctgccatcaccaaatagatccaatgactcatacgaagaatacttatctattgccattaaaaattcctcaaagctaagggtatgaatctcacacgaatccaaatcccctgctgaatacttaaattccttattcagaattcgtccaagatagcttcctgtaataataaaatcgctttcaaggttacgggtaaactcacgtatccggttatagatatctggggattcctggatttcatcaataataaccaccgtttctttagaatccacaaacttcccattgaatctcttcaacagttcatatacagggttatcacatttcaatccattttttatgtctctgcggaggtcactgtaatgctccaaaaacatttccccgttaaaatccagtaagttaatataaatcttctgcttatactgttcatctgcgaatttattcacaatataagtttttcccacctgtctcgcacctgatacctccagagtggtatgccctgggcgtttcttccacgcaagcaattggtcatatacccgtctttttaaatatttctgcatatttcacctcataataggaacctgtcactttctaaattataacagataccaatttcatttccaactaaaagttcgttatctaccagtaggtcagaaaattccgccttgtctttcaattatgtatgcatgctataatatgatgtctccagattctcttgcccatgcagaataacaccgccgctgatgccgtttccgtatctggaataagcatcaaaaacaaagctatagggtgtaaaatcatcaaaaatgacaatgcgttcataatctgcccatctaaagctcctgtcaaggaaatgccccagctttctgcggagttttttattttccgcaacgcagcgcaaattgcgtctgcttctaaattcaactgccggcagcttatccggaactgataatactttcttcacttctctcccattacacaaagaaaagttgaagctatccgttggaaggaacagcaattcggttctgcctgttagtgtcccgtctcctatgctgtttatccatgaaaacctgatccgtattttttccggtctgccttcatacgttttaagatattgcagttctgcataggaagatatatctttgactatgatacttccttcacgtttcatcctatccagctcacttttgagtatataaaaattatgtggactgcgaaaatctctggatttagtttttactgcaaaactgtcatcattttcagtgattttaaccattgttctatccatatatacctccacaaaaaggaaagagccaggcagctctttccctattcctcatatgtttatttagttcacttatcattatccagattaaatggaatccggccgtaaagataaattggaacagtatattgcttcttacataaaagtccagttctccacttgtctgcaggttaagcggccatatcccggtggtaatttttcgctgttcttcgctgccgcttttttgcctggtgtacatggcgattgacggctcgtttcaactgcttccggaatctttctacttctattaaattatattttctcaaatctcttttgtataggataatgcacaaatgataatacaggcatacagctaatctgtgcttataatatgtaaaaacaccttcttcttttaattgtgccagataaatagctccaataaacaaaagaaccataaaaagatcaccagagccttccatatacaaaaagtctttccataacatgcacaatttcctcctcttatacccatttacccgggctttcatatcatacgagaacaccatcttcagcgactatgacagctccatatgtcaacttgccatctatgtatggaacatcatgtagtttaaaatcttttaccaatcgatcggaagcctcctgtgtctcgcatcctgcatattccatattgctatgttcaagttcttcacttatagcctttacgcacaaatctggatctgtcgttgccataagaaaccggtagctgcagaatgatttccacacatcgcaggaaaacagtatgaagatatcagcttttttcataaaatctccttttcaatacatttgcttgacaattacagtggggctgatagaattttttgtttgactaccttccttgtttaatatgcgcgaagcgcaagtccttataaatctgattagttctttcatactatcaggtttatcttattcttcacataatttctttacaaggagcactatttcctagactgacattatctaagaaataaaatagaggaagtcctgtcatgtcagggcctcctctaggtcaacgctctattcttttatttttacctgcactgctatgtttctccttttactgtcctctcctatttcaaaggatactggctggccctctttcagggtacggaaaccatccatttcaatgttgctataatggacaaaataatcagtttcatcatctcctgtcacaaagccatagcctcttcttgggttaaaccattttactgttccattttccatgataatcctcctgtaaataatctgtgttttcacttgtgatataaatagcataggtgatatcacccgctttttcaaagtcttttcctacccgaccaggactggtttgtccttttttatacaaagaatacgtcttgataaagccaaagattgattgcataaaaaaaacacctgactaggtgctatcacatcttatatctttacgcaatattccatatgcatagaactaatttcatttatccactggttcagagaattagaaaccatagtaaagcttgtttccatatcactatgggactggatggcctccagcgcatcttcataattcttcagataatattctctgggcgtaacttccctaatacttccatcaaacagataaatatgatattcccatccaggattcaaaatctgatagcgtgtgtttgcccaatgttcaagttttacaatcccataaattttatctgttggcagcacagatagcgggataccatcccagactttagccctttttttctgcctgtactttttataactgggtgacaggccgccatatgtaactccatactgttcttccattatcttattggctcgcactgccgcatccatcatatttccgctgccagcggcataatgcaaaagatactttctttcttcagggctatatttcacacgataatactccaaccggttaataaataattccatttgctgagtcacaggcagctgttccgcatcaattaccttttcggccgcagaatagattacaatatcaaaaaaacgatagccacaatctccgcagttaaaaaggacactgaccttcgctccaatcttctgcaggtattccaggcacaatgtagttccgtcccatacctcaagatatttttttactgccgctttggacatattagatatcttatatgtgatcgagttctgagaatctaatatttccataatcactgcctgccgcagtatttcctgctcctcctgcaaaatttcataattttttcctgttacacaatacatcttaatttcctccttttacatgataatttttctactgataaataattgttttttattggcaatatgtaacctatcttgccccatccctccctttacctttatttttcacaaaaaaaatccctggcaatagaaacctattgctagggatttaacagcacaatatacggcgtaagccagtatatgattaaaagtgaaatgaatttatgctttcattataatacatttctataatgaagtccagttcgtaagtcggtagatgacagaaagcaccgcccaaaaccctctttgatagaataaaaaaactcctaaaaatttggtttttctgtaaatcgttgatataataattataaaaaaagtaaggagggctgtctatgagtcacaagacgttatttggccttgatatcgagatttgcttgataaagctaatggttttcggtggggttggaattgtagtggatatgatatgctttatacccttgaaaactgcattgaccaccaatcagttagatgctttcttaattggttcgcctatattttttatgattttggggatttttacggaagtggcagagcgatttgagataccaaaaggcgctgtagtttcccggtttctatttttctttacactggggctttcggtaattggtgctctcttaatctttcgtaattcgcagctgttaaaaaatatgcacatcacctcgtttatcgtatccgtgattgtaggtctgattattggtgttgcggttttagcaatgtttaatttggaagcgattacatataaaaataaaattgcaggctatatcttaaccgttctcctggtatccagtgtgtatttttatttatatgtgatagcccttggaggaatactcctgttcctcttgcttgtaggttttttgggggctggtgcaggatcatgatactatattaacgaacaataaaggaaaaaattatgtagcggcgatctggcgcaaacaccatgtcgccgctttacttttctcaaaaacgctgtaatgacaacggaattaaaaaacactagtattatcttcgtcttggctgatatttgcccggtctgtccagtgctcatgcctatttacaactataatgatcttcctgttgccgcaaaaatgcggctccattattctgattcccctttccctggaaatcagtttctttacaaataacaggagttcatgatagtcatcctcctgcatcttcggaataaaccttataagactgcggcaaaatggctccttcagcttttgctttgtaccgatagtcttaatatactctataagcttctcctggctgagctcctgattatcttccagcctgagtgcctcgtctacagcctcccgcagcacctggcattctttgtactgtatttcaaaaccattattcaaatactgcataatcacacctcctcaaaacagtataccttctgtattaaggatgtgtcaaaattacagcaatatttttacctattaccaaatgaattgtcatcagaacaaccttacagattcccggattatgctgtctcatctacccctgccattatctgaatcttttatttcaggtatttcccgtagtgatccaccgcggataatgcagtatgtaataagcatcaaaatcattaaaataataaaaataaccataactcaccttctttctttgagccagtaataaaaatccccacccagcattacataaaaaatcattttcccttcgtagcaggccacatgatacaaaatgttcctattccttcaaaactgagacaactttgctcataacagctcttgatatgcaggttttcatttggtacgttaaatctatattgatcttatttgtaaggagagcgcgtttatggaaataatccctgcctgtcacccatatatccaaaccccagaggggttaccagatcacactatgattcttgctgcagcccatagtgcatttactaaaaacccggcacttaagcaatcctggatagaagtcacagagcatttaatatctgcctcaatcatcccgactggttttgctccagatgaggtgcaatttgaaaaccatacctgcttttccatcgcacggaagtatcaatgtacattcatttgccatctatgcccgctttccaccttatataaaaatggaaacttggctgaagaaacaactatcctatctctctgcctgaaatcctgggaagacttaaattttttgaagcccttccttaacagccgtatattccaagggcagttattaatcaatccgaaacctgtaaactgcgtacctactttgcccttaaacaggcttacctatgaatatcttgcagaggccgtaaataaagagacctgtttcaaaaacatacctgccttaattgcagaaattctactggaaaagaatcgagaaaagctacggcctgaaaacaaaaaaacaatccaaaagtatctggtagaattacaggaaaattctaaaaatacaacacgtaatcaggcgataagcgccctaaagtgcctgaccccggatgacactcttccgcaacagaatgaagcaaaatcagctctccctgacgccaaacctcaaaaaccggatgatgcctcctgccttgagggattacttaaggatacccccaccgcaatacccaataaagggaaacagcagtcttgtaaaacgccgcagccagagccggaaccgttgccaccagttccttccggcaaaccctctcctgctgaggctgcaaaagcttcaaaggataccaaatcacctattgaaaaaaaatccatgaaaacggatgaagcaatgaagatagaaacggtttctacagaacagtcatattttcttaatcctgagtttcatccggatcatcctgagccgcaattgttcaagagaattgcagatgacgatgcttcccgactaaaaatggaatttgaagagtttcttcttttaaaccccgaattggctgtggaaatcgtcatagatgcacatacaaaaaaagagggccttcttctatacggttctggtgttttctatttcttcgctctgtcagaggaagaaataaaagacattctcagcctgtacgtaggaaagagcaagcgccgccttatgatatgttacgaaccataccggttaattcatttcctgcacaaaagcagaataccctttcacaatctggtgtccctgcgcactgtcactactgtcatggaccggatgcaaaaaaataatctgaaaaaaggaacccctttagaggtcatatgctcctctgccgctttgtccgtcaggcataaaccgtatccgtactttgtcaccatgccgctgtattgccaggcatggaaattcctttcttctaaaaagcagtatttagataatttgcagcccatcacaaacgctgccaagctagatgcgttgctggggatatcttttgatctgggagaaacgacatatactcagtctgcgctgtttacctttgacaataagtcacggtatctgttttcctacaggaaacataccgacaaattgaaggaggacttcctctctgtggaataccagtttgatgtaccaaatggatcggaagatactttcatgacggatgtgcttttatctattgccgggcaaaacctcttttcaaagtacagatgccgtctcctttcttactccaggagttccctgattctttctgccaaaaagcaggatgccccgtacctgtgtgaatttattttttcactggcaacaggaataagtgaaaaattgcaccttccacccctatccgttacagaaacaattattgacgatgcctgaattatttctgataaaataggaaggcacggtattcaccgtgccttgaggccttcgtttatccgggatgccccggcactgctctccttttttagatactattcccatatttctgtaatggaatcttcgcgaaacccgcattcctggcaaaagtccttccataaacactccagttccgcaaagaactcattttctgttacacatgagcagacgtcaaactgtgtctcatcctccatttcctcattattgaggaacattatattgatattcctatatccgttctcatccgtggaggcacaatacccagctgatgccattcccatatttttaattacttctgaaataaacatgtactctccttccaccctacgctataacaagatttatgcttctgttataactctctttctaatatgtttttgaaacggccgtacatacgtcatattagaaggtaaatcatagcccaggcttctggcaagccgaacagcctcctcggatgcactctgccccgcaggcagccttcggatatagccggccagtgacttcctttccatgacgtattcccctctccggtaaaccttcattggcgatttgccctcatttgcctgcttttctctgcagctaaaaatcaccaggggctgatacggataatggaactctccctgtaaagattctacttgccggatcgcatagtttttcttccggtctatattcgcatcacaggaaagaatataataattctctagtacaaagttcttaatctgctcatgctttgcttgtaaatccgtatgttcataaatactatagaatgctccgtccattggatcataatgtccagaaaactcaccactttccgaccatacacgataaagcagtataatcctctttcctctaaaaatttccctgaattttattttcctgattccttcagcattcaaatataccgcttcgattcctctcgatggaagcatatatcttctgtgctgcagttcctgctcgtagaaactggtgttcttccagatacgcgggtattcgactagtgtatgtctgtaaggctcatctggaagcatgtctatggtatcttccgtgatataaggaaacatactatacaggttattttcatatacattcacataatggcctaaataaaaaatttcttccatatcatttacatcatatccgtattttctataagccttacgaatttctttctcactaagcgcctttttgccatgtatacaatcataaaatcttttctcaagatcataggctccgcagtctgaatatgggaatttactctccctccaaagcagggcaccagaacttagattagtaccgatacactcaaactccccggtagaaggcttgaggtaatggaactgctgtagtacaaggcttagatacgcattataaattctcgaatgtccctgttttattttgcttcttgttttttttgtaaagaattcatagaaatcaataaagtctccccatatctctttttcttgaatgtaatctgccattttcttgtagaaactatgaatgtttttcacaaacatctcaggtttcaatactgcctcttccatctgtttctcgtatgcccggatgaacttgcctatatccggatcactgcatttcaagtacagccccaattcaaaatcgcaaaaatccaaatctgatacactcatgattaccattgttgctgtgttgattgtccgtttccgcaacacccattcatcaaaagattcctttcccctgattccgtaaagcatctgataatgcaaagtctcctccattgctttcaatgttttcatctcatcctcctgttatttttgtatgacggtaagcttctctgctaaattctgtacctcctgtaaggacatcccggatatatctgtctgtctcaattgttcatatgcctgctttgtaatttcgattggcacatacctcttacatgaaattacgtccatttcatagtccatcagaatcatatttcccaatagataatatttaggaagcttcggatataatcttgctgaatcccatttgagattatttccattgatttttatccctctgactaaaaccctttcttctgtacgccttttaagcagcattgtcatgtgcagtacctctggtccaaggcggtagacttcgccatccggcccccataagtatctcgtccatgtaataccatgatccatttccttttcctcctcttcttaaatactgagatacctttttcatgaaaaaacggcagctgtttcatacagccaccgctaagatttcatgttatccctgtttatttccgcaattttgagcacaaaaaaacctgcacgcatggtgcaggccttcaaatcagtacctatctctaggaattttaataacactcgcagcaaaagctgctgagacttaaaaaggtatcatatagataaagtatagtatacttccccagcgatgtaaaggcagaatcccagtcttttactcaccaaattttcttttactatctgttatgcctaggatgtaatctacactaacatcataccgttttgctaattttaacaacgcccataacggtatctctcttgatccattttcataccttctatagacgccctcatggcatcccaaaaattgagccacatcaatttgccgtaaatcgtgatctgtccttaaatcccttatccttttataatacatatcgccctcaccgtttggttagatttttttaaatcttatcatcagatgatatgtttccctcaaaaacgaaccattcagttaggtaagtattggataagcaatatttataaaaggttacgatatgagaaaaaatgtaccacaaccctattccccaaaccttcttttattatccgttatttcaagcatgtaatctatactgacatcatacaacttcgccagtttaaacaatgcccacagcggtatctcccttataccattctcatatcttctgtatacaccaacatgacattccaagaatttagccacatccacttgagtaaaatcattgtctgtccttaaatcctttattcgcctgtaatacatgtttcacctcaccatatggttagattgattcttttaaatcttaccatttggtgatatactttattcaaaaccgaaccatttggttaggtatgcggagggtaaaatattgaaacgactaggaactttaattttattattgtgcatactaatctctggatgtacaaaacaatctgtagaaatggatgttgtctcgtcctatagctcaacttctgacaactggtacgatctgaacattgatgtcattgttgatgaagatgtcgcatcagataaggatacttgctctaaggagattatacaacatattcttgacaacgattttcacagcacacgcttttcatttgatttaaatggatatccaaatgcagtagctgtagatgtctttacttctgaaaaaaatataaaaaaaggtaaaaaggcttattcttttgaatacgtcacgaaattcaatgcaaaagacattgatatacaaaataatatcaaagataatcccgatgaatttaagatacaatatgaatagtggcatatggtggacttttaaattactgcctgacgatacaaaacaccggagaatcatcgccatatggctttaatctccggtgttgtgatttatttccttgccgccgacaacgaaagcactgttccgcttcaacatctgtttgcaaaagccgttaaaaggacatcggatttgccgctgggtacagataggtaattaaattatcaaaagctaaattctttgttccaatcaaaccccatatctttttctacgcttataggccagtggttacaccatgtaggtacacaaggcgtttcaaccctgtcgcagcttggaatataaggctttatatcaagcacaggtgtgtcattgtttgcgtcaatcccagtaatttgaagaaccccattatcataatcaatttgaagaacttgcaccactgtcaaggcaagaggattcggtcgaacaggcgcccttgtagcaaatattcccataatatccggggaagtcttatatggttttggaacctcgaaaatctctcttgcctgctcattgtcaaaatcactgaaccaccaaattacatcaagatggctaaacccatcaagcccttgtaaagccggaatgtatttaggataaacttttataaacaccccatcatcggtaatgcgaatctttcctatcgtattaacttgtaaattatccattgaaactcctccatttcttattctaattccattataatatctcacaccatgtaagaggcaatatataaaaaatcattttgcatatgtgcaaaatgatttttaggaacagtattatatttcttctaaggcaatttgaatttcggttaaataattatcaggatttttttcattccaagtcccacggtggacaacttgtctactttgacctgccattttataggcactatgtccttctaaccagtttgcaaaagaacggtatgctcctgctatattatggaaatcaccctgtaccattgtacaagccatgataggcataggctccgtattgcgataaataaaatcattcatagttgcttttgtttctgaaacagcaacacatatttcaatgtcaacattggtttctttgtattcggcatcatgatatatagctaatgtgcttttgggaaaagggatattgttaactttcataaaatctatcatttctttccacattgatacttcggcataataattggggaccttccgtcttaaagatacgacttgaaaacttggaatggattttacagcaacattataattcatagataatttttcttgcataatatctttttgtgcttggtctattctaaacaacttatcctgttccgctttaattgtattttctatctctgatcgcttagaggataactgttctgtaataaactcattgctccagttatttaaggcaattgagatctctgctacattaaagcctaaatcccgtaaaaaaataattttatttatgtcggatatctgttcagctgaatataatctaaagttcgtaaacttatctattattgctggcttaaacaatccagtttcatcataataccgcagcattcggatagaaacttgcgttaattttgaaaattcacctattctaaacattttatcacctcgccatcatgttttaattataacccttttcctctatacttcaaatagaagaagcgaacagcaaaaaaacgggggaataaaatcctccgttcctttgtctgtgtagccattggaaacgtcgcaagttgcgacgtttttttgcaataatctatcatatcagatattccagctattataggaaacagcatatccagcaagaatcattagaaattgatgtttgccttccttgcctggctgcataagtctcggacattcaaggtataggttttgccatccttaataaaatacgttccgcattgccgaaattcaaaatgtactccgctgactacacattgttcccgtatcttaagaacccaggcataatcaaggggcctggcatttttatccgattcaccgccgactacaaccagctctatattttccagatatggcgaaaggtctatgctttcaatcaatggctggcaaacaatatttttgtgtttgatcgggagtttactgaaaatagaaagcctggaatctgccctatcctgattttcaacggtgcatcctactgtcacattttcatatccatctctccaatcctgggggatacaatccataaaacggtcaatccgctttgtcaggaagataaaatgcagatcagagcgctgccgtatcatttcccagcattcattacgccattcatcggcatcttcaatcagaaaatcggtagaaaagcaaagatataccatttgccccgatttcatcttataagcacctgacttatttttttcaacaggcgcatagaatttatctgtatctgttttcactatatgatccgtatccatgccacgcctgagatcgcccttgtggatgtaacagtatttgcatccttcgctatatttgtggcagccccgccacggattccacattgccatcaatttccctcccttcccaaaatcatcccaaaatatgctgtctgcctttctccagagtacatatcctatgacaactaacccgaccaggtcaaaaagcaactgaaaaaaatgtgttattatgaagcagcttgcgacaacctgcaagcacattctgatatcattattctacaacaaactttctaaaggcacaacataagggcactttttaccaggttctttattcattctctgaaaaaagattcacagatcaaaggtgatcttcagataggctttatcttaacagtgggaggtttccagtcagcttattaaccagttttttatccccacaaatgccgacgccaaaataagtgtactctttttcctccacgcttgctgcttttttaatatagtcttcatatatattacagctctgggccacgtcagaaaaatcaaccacaatcaaatccgagaatttcggttcatacaactgttcccgaatcattcggattctctcctttgtcgcttttaataccggtacggggaaggcaatgattcctaaatgttcctttccattcttatcacacacatccggtcccacggcttccggaatatgctttcccagtgtgattcccataattccggctgtatttgccagcatgcctaatggcagctcctcgtccagtaccatcacacatttcttattttgttcctgcatatatctcatactcctttttctactacaatatatttatggttaatatcccttacagccagtaaggaattacccatctcgttgcttaagctgtataatgatggagcaatcggtatagcggctcctttcctgggcttcgcgcccgtaaaatagtctgctagccagctcctcattcgcagcgttcgttttatgcaggttgatccaccttcaaggtgcgttcgtgtcacaccacagtagattgaataggcaatgagtaaaactggtacttatccattgcaatcattaattctaaggagtgacaatttatgaacatgaacgcagtaggtattgatgtttccaaaagaaaaagcacagtagcagttctccgtcctggtggagaggttgttgtaaagccctatgatattccacacttggctgatgatttcaaatcgctcaccagtctcctgcattctctggatggggaaacccgtatcgtcatggagtgtactggtcgctactatgaaccagttgcccggacactgtcacaggcaggcttctttgtaagtgccgtaaaccctcagattatctgcagcttccaaggacagggtaatcctctgcgcagagtgaaaacagataaggcagattccgtaaaaatcgctcgctatgcacttgacagttgggcaaagctgaaacaatatagtcttatggatgaaatacgcgctcagcttaaaacaatgaaccgccagtttgatttctatatgaaacacaaaacggcaatgaaaaacaacctgatttgtctcatcgaccagacttatccgggtgccaatacctactttgacagtcctgcccgtgaggacggcagccagaaatgggtagatttccttgacacctactggcatgtcgattgtgttcgtaaaatgtccttaaaagcttttactgaccactaccaaaagtggtgcagccgtaagaagtacaacttcagcaaaacgaaagctgaagaaatctatggaactgccaaggaactgattcctgtacttccgaaagatgattttaccaaacgtattatcaaacaggcgatagaacaactaaatgctgcttcccagaccgtagagcagttacgttcacttatggatgaaacagccgctcagttaccggaatatccggtggtaatggcaatgaaaggtgttggaccgtctcttggtcctcagcttatagctgagatcggagatgtgacccgattcacacataaaggcgccatcactgcatttgccggagtagatcccggtgtcaacgaatctggagactattcccagaaaagcgttcatgcttccaagcatggttctcccgctttgcggaagactctgtttcaggttatggatgttctcattaaaaccaagcctgatgatgctgtatatctgttcatggacaagaaacgtgcgcagggcaagccctactatgtttacatgacagccggtgccaacaagtttttgcgcatctactacggaagggtaaaagaataccttgcatccttgtccgcatctgagtaatcaccacatacctttttattagaccggcattatctggcggtcttattttggtacctgcttttcaacctgtataaagttttcaatgttctttaaatttttgcttgactttttatttgcaggctgttttttttgtccggccgaccggttttctgatagaaacagtccagttaatgtcagaatgatgcctgccaccataacgattgtcaatttctcatgcaaaatcagcgccgaggtgactgctgtaatcacaggcaccatataaatatagacgctggttttcacagaaccaagaatcttcactgccaggttccaagtcacaaagcagagggcagatgccccaaagcctaaaaaggcaaggtttaaaatattggtcagatctgtaaactgtacaagctccacatggaaatccatgaaaaaaagcaccggtatcataaaaaccagaccataaaaaaaggttcgccttgtagtctgaatcgtctgcaatccgaagctgctgatttttcgtgttatcgtagaatacaatgcccagatgacagccgccgccattgccagaaggtcaccgaaaggatttaagtgcagcgccttttctcccccgatgctaatcaggataactcccgacaaagcaattaaaaatccaacaaaaaaccgggcattcgggcgtttgtcatggagcagcagcccggcaaaaatcgcggtgaagaacggcgccatagaaataataactcccacattggatgccagtgtataggtaagcgcgatattttccagcaaataatacagtgtcacgccacacagccctgccgcggcaaaataccactcctgctttctgtacttcaaagtcagccgccgggggcatacgcaccacagtgcagcataaccgatcatgaaacggataaacaggatttctactggctggaatgtacgaagaagtaccttggtggaaataaaagtagttccccaaatcaggattgtgataaaggcagccacatgcccgcccacagttgaatttattttcctcttacttatcatcgtcccactcctttgccggaactgcagggtaagtagtgtccgtaaaaattctctggtattgtctgggcgtcagcccgataaaatccttaaaaaagttgctgaaatggctctggtctgtaaaacctgacatactggccacatcaataggcgcaatgccctgttccaagtatttttttgcccggttaatccgaatcgtctgtaaataacgatagggggaaactcccacttgctttgtaaaggagcggagcagatacgattttccaaagctggtcatggcaagcaggtcatcaagcgtaatattctctgaaaagtgttgttccatatagctgcaaagtgtcttaatctgctggtttggctgtgatatatctatttcctcaaaagaatccacgcattcctgaagcacctgttgcagcaggaagaaaaaggcctcttccttttcaagcctcggtgcattcctaagaatcgcgtcatacagatccccaagacatcgggtaatatcactctgataaataacatttgctgtaaaatgcggcgtaaattccttgcccgtaatctcctttacagtccgcagcataatctctggaccgatattgactgcccggtaatccagaatctcactgtccaggggtgaacaataatggttatcccttggattaaacagaatcaaatccccctctttgaggtcgtactcctgtcctttgcaccatagatgccttcttcctccctcgacaaacccgatcacataatagtcatgaaaatggttgggaaatttctggacaatgccgcttaaattataggcttctatttcaaggtcatggtcgtaatagacatgcctctgctcttgttctatatgcattttaattgtcctccttcgattttcacaattttatcatcttaagagaaaaatgtcttgtaagatatgacaccatccgctgcataactccctcttttctgtgacgacatcaatgatcctgtttaattccttcggggtacttctttgtaaaaacttcatttgccttttctattgcatcatgatactcccggtaagacgtgcttaaccttttcatcgccgggataaatatatcgtaataaccgctttcccggttaaacttttccaaacactcttgaagcctatatgctgtggactgcttatattcatcggattgtttgtaagtcaggtattactctatcacttcttgattctctgaaatatattcctctggattttgcaccgctttgtttatgctgtccgatatacttgtgacatggtcgatgtcaaagtttatagttacttcatcaagatattcctgtaaatcagccggaagatttaaatcaatcccatccagaaaggaaataattgtttgaaaagcctccatctgtatgtcgttcacaattggctcattaaggtatgatgcgaaatgcatacttatatattttccataattgcctgggaatagattaatcagacgttccaaaatcgtctgtttctgttcaatagcctccagcttcattcttacatattcccaatcctggttttacacaagcatttgaataagttcttgctttgattttaacgtttctatttccatcgcctttttcgatgatactttagagaacgtcattttacctttttcattcaaaaccctctgaatgtcggcaacagacagtcccagtttacggagaatagcaatctttttcaactgttctatgttacgctccgtaaaattccggtatccgttttctaatatctgaggttgaattaatccttgttcttcatagtattcaatcgctttttttgttaggctgcattctttacaaacttcattgatcagcattgctcatcacctccatgtctatcttaccccgtcccccagggtggtagtcaatagggggggcgggcatattgagaaaatacgagtaattaagccgggactgcccttataataatcacccttttctctgaaaaccctggctgcaggtatctttcacaggagactaaagtgacacagactttatcgggaaaaaaggaggcgctttctgacctcaaagccttgtcctttgcttctatccggtagggatactcccggccgttctgaaccatatagaaggtgtcttcaggctccagttcatccagccggttaaagctatggccgaatgtctgggagcaatggccgtaaataatataatttcctttattgagctgggtctgggtgtccgctgttacaaaataataacggtccaaattataatcattgtcattactccgaatgatcgcttttttcatgtttattttgtctatcacaagtacgctgtcaatgcttccgacaaaaccgtttgtccccacatcactataatcatatccctgtccctcgcctgctccggctgtttcctgctcctcatgtatcaaactgtcatccggctcctctggcaaaggttcttttggatttcctgtctcctccagatactgatcgatcaattcctcctcatgtgcttgtctcttgtcagcctgaaaatatggaattaggaaaacaattactgcagacaaaagcacagataaaaccgcaagtccgaatataaatggcgctttctttctttttttcatagcagttcgctccttaaaaaggcgggcgcatcactgcacccgcttcttgttctaattttctggtttcttgttcttcatccgttttttccgtctgaaataaataaatgcggcaccgccaatcatagcacctccaactacaagtatggcaatcgcatagtgtaaatagctgtcctcgaagccgagtttcggcaccacatgatttttgcatgtgatggtaacatccttgcccttcatcgcaaattctaccttctgggatagcttctgataacctgcaggagcttttttctccgtgaaataatagtccccgtaggccagattttctatgacaatctctccattctcattcgttgtataagttcctaaatgttcattttttgatgaatacaggtcaaattctgccccggcaagacgttttccattggaagcgtcctccttaatcagtatcactttggctttgattaacttattaagtgccgggttttccttattgacatcaaaaatggtatgcggctcattttccaggattaaatcaaacgggtgcttttcttcgtccagttcgtacccttctaaagtctgcagttccttgtagtaatattttccgctcaccagggcgcctcttaatgttgcctttccatccttgttggtcttaattgcaccaatcaggctatctttcggaagtaccactttgtctgaatagtctttgatatcttcatccgtatatatcccaaaataaatgccctccaaaggttttttgttatagccgaatgtaccgtctttcgggtcgagcatctctccaaccttatatacgttgatttctgtgtctatcacggaattttcaatatccaggctgatatccaccaccttgttgtcctcaccctttttcagttctgcctcatagaccttatggttcatggccagccctgccggcgtaccagtctctttcacggtatacttacccagcggaagatcttttgatgtggccagtccttcctctgttgtttcaataatatcagccacctccccagcttcatcataaatagtgaattccaccccgggaagagatttcttttcatattccatgcggtggatcggtccaaactgagaatcgttggtcgttgttccaaccagcatatccccgacttttacaaccgatatctttcccgtctttatgtattcgtctgtcatgctgactttttggatttccccggtatccagtaccgtgaacggaatgtcctctgctagttcgtatccatccggtgccagtttttcaatcagtacatagtcccctggttcaagcctttcaatacggtgaggtttaccgtcagatgtccagcttgctacctctttccctgtgctgtctacaatcgtcaattctgcgccttcgatttcagatccaccgatatccactttactgatatctaccttagtgaagtcattcagcatttcaccagacagttccagcactttcttactctgatctgttccatccgtttcaaactccagtatttcttcgcttattacatatcccggaatcgtctctaattccttaacatagtattttccatgaggaagatcagctgtaaattttgcctcaccagcttcatcactccagattccttcaatgaatgtatctttttcaaggataacttctccccgcacattctccatatcttctgcagcatacagaccgaatttaacgcctgccagaggctcggatgtttcggcatcttttttgagtacacttatctcaattttctgtctttcattcacaacctcttttgtcacataatcaactgccacttcttcgccttgatagcggatttcaaattcgataggcgcaggatccagtacaaagcccaactctgtctctttttcgacgatatagaatttcccgattggtagattattcagtgcagcctctccattttcgtccgtagatatggttgccaccaacgcgtccttctcataccgcacaatccggtttccttcctcgtctgtctgttggtcaggcgtatagatggtctcactggcgtagatatcaaatactgcctgcacgcccatcatttcataactaaactctatcccttccacctgcttgaaggaatcttcattcgtaaataaattcgtcacagcatttgcggcacggataagaccatttttgattctgccgcccagcttttcttccaatttcgcagcgtgatccagtttctcaccttttttcgttaattttaagcttccgaccgcctcatcattatgctgttcaatgacaacgataatttttccggtttccggctctaccaaatgtgcagtgttagagtcaatggtaactgtgatagcgtcttttccggcatcctggtagctgcccccttctgttgtctggttcagcggtacactttcaccgtttttctccagaataacctcatagcctggctttacatactggtctggaaccttcacttcatcaatccggtatgtaccagattttaattgctccggagtaatcaaatagccttcgtcatttgtgtggaatacattaagtttctcttctttggggtaccgtacaatcatttccacgtatttttctgcctctacatcatatatcttgtagctggcactgttcttcaataccggtaagcctgtctggctgtcctttttttctattttgaggaaaaactggaatggacggtcatcaaaaaccctccacacctgcggttcccttctatcttcattaatatgaaccataaatggattcaccggcgtcagattttcaggaactgttgtttcaaaaacaacatactctccgtatggcagctccggagaaaggaaataccctttttcatctgtaaacaattctggaaccgttattttctctccattttgataatatacagctggtgtatccttggagtaatcgtacccaatgaaatcggctgctgaaaagctgtcaccgctccccggcttcaaggtaccatcttttactcccgcaagatcacggattaaaaatactttaaatcccgctccttttataaggtctgtctccgtctgctcaccatcttcactgattttaataacctggaaagcctgcttcttcactatttcaaccaccgttatatcccggtgtacgattttcacatcctgcccatcatagtttacatccacgggataaatcgtctcgtctaaaagatatccctcaccaggctccaattcccggacatagtatttccccaggtacagctccttaaaatcaagagtgccatcctgtttaatcagcccctgctggaccaactcatcttttttatgaaccagccctgttttctggttcggatggtggatatcttccgccgcaaagatgccgtattttgccccggcaaggcttgcatctccctgggagataaagtcattggcatcccggtcaatttttttgatatggacttccccacgcacttcctcattatggaattcgtgagtaaatgtgtattcgtaagttgtatcatctttgtattcataccggaacgcatacaattcatcacttttgtaataaaattccggtgctttgatttccttaacataataattgtagttgatcggaatgtctgccttaaatgcgccaatgccatcctcattggtcgtcactgtttcgattaaggtgtccttggaaactacaatattcccagtctttgctttgatatcctctccggcgtacaatccatattctgcgcccttcagagtcacggaatcattcttggactttttgaccgatgaaacctgaataactggtcgttcattcttaaaagtcgcttccgcagatgacagctctatcgtctgccctgcataggcaagagtaacctcttttgtcctctctgcttctgtctttccaatcgtcagctcccccggtgctttctgctccactatcttataggttcctaaatacaagtcagaagataccgcgctgccgcttgcattggtcttaagctttgttacaagatctcctgctttatggattttggtttttccgtcctggcttacaatatcctgtgcggcaaatacattatattctgcatcggcataggccgtattctcatacaaaaactggatcggattcccattgctgatgcctgtcagcgctggtccttgtttatgaaccgtgattcttcctttctgttcctggtttgtagcctttacatctgtattgcctcctgcaactaatttgacattataggcttttgtatttaatttataccctttcggcgctgtgatttccttcaaataaacagtttcctgggttttctcgatttctgccacagaggcgcctttgtcatccgttggtggcatttttttaatcagcgaagtgcatcctgcgtccgcataaattccaaaaaccgcctctctcagttttacatgggtcgtctcatcctcctttatcaggcttattttcgcaatatccatccacttaatctggaaacttactgaatttgccggctcctcaataaaatcggcataccctatatcctgcgtggtattcccggtgcttaagaccaatgttttatactggctgccgatctgccctttcaggcttcctgacttccaggtcccggtgacagttttcggtgctgagaagtaaaaactggtcccgccactaattttgactgaaccgcccttctgtgtcttgccaccgccatggtaagtcacattatccgggactttcagggtaacaaagttcctatggtcgccactaagttttatagccttagttctctgcagctcaccatccagatatgccttctcggaagtggatgacaggctgatcttcgctaccgggggagcctcctgcccaaacaggaaatcaatatatcccaaaactccgcaatcctgtaaatcatccatcgtgcagccgtgaaagcctgcaaggcctatataagcataagaagccgccaaatgcgtaaagatatatttaaggtcagcgtcaaaatccggcatgtactggcccgttaagtcccccggaccgccataaccataataaaggactttttgcagattcatattgctttccagtatctctgctatgtagccggaatctggaggcgaagccttatcagactccagacaataggccagtttcccgtttacgtaaaaatagttagtctcataatttcccaactgtgcaggatagggcaagttcttcccttttaccagattaacagaagttcctctggaaagggctgcggagcttggcacaacagacagaaacactcccatctcattgtcatccgcgatcacttccactggttccggttctatctctcctggttctgattctttgatttccacagattcttccggctcagggtcctcctcatcatcggaaccggcttcgctctgctcgctttgtccctggtttccattttcgttttccttcggcgtctccggttcttttgctgtcacaataatcttgcgttcaactttgtatggactgttaccacttactggatatacgccataaaaagcatgataactgccttcccggtttccatcaaatggctggttgctgtcatcaattgctttcaagtatttaatttttactttgtcatccacgaactccatgccgctgaagtcagtctcaatatcaaatttttgtcctcgtacaattgtgtaatccgtagcttttacaatctcatctgcagcaacctgtacatcttttaaataaggaagcttctcagcctcttcaatcggcgtttcagattccaaagctgcatctactgtctcgcttttcggtaattccatattggcatctgtatcgtcttctgccgatgatatcagttctccctgatcctctgctgcccaagcggtaacgccagcatttatcagagatgaacatcctatcaaaaatgccaggaccccagataataaccttttccttccttttttgtccattctgtaatctcctcttcttttcttttaatccacagatgtgagtaaccaaacttacatggctttgctcactaccgtaaggacaaaatatcccacgatagtccgtggttttatttacatgtaagaaatgaccgtttcctacatgtgcatggcaacaaaaaacggcaggcacatggcctgccgcatttttctataaataatttcttctaccctcctttcccctttaattaataccttcctatgaagatatgttttcttatggtaaaaaaaatgacctgaaacaggtcatttcgggcgcaataagcaggcgtgaacctattactaggaatttctacgcaccctggcttactgcctaaaaaatacaatttaatcttagcaaaaaaagaaggaatctgcaaacacgatgaattgctaatccgggacataatataataacaggtaaaagataagccgaattgggacgctaaatctcaatcagggaaaaaaaggtaatttattccttcatagccgcctggcagataacaatgccagccttttctccatttcaaaagcattctcacagtctattgggaattgcttctctcttgtcatcaagtattgattactatatccacacatcaaagaaaatactgcttcttggcatctttatcttttagcacacaatgagcagtaatccgcttaaaggctactgctcctccatgccgcattttgtattaaaaaaatcccatcattcatgggattttttctgacaggtcataattattttttccaacgttttaaagtagggaaccactccatcatcgcttttctcgcttgagcctcactcattccttcattggctgaagccatatttggtgcgcagaagtcaatcatttcctccatagttccattaaaagtaaatttacccttttcaaaacagtatttgcaataatcctcgttcttacttccatcctcatttgtcccatacatctcatcggtatctcccatcggcatgccgcagcattggcaaaatctcttgtccatttctcgtcctcccatttttaattatagtcataggtaaagtatacactctaaaatctgacatgctacgtcaacctttatttttttcataaatttttcttccttcttctgctaaagtcttacgcaaatgtacaggctctatcacttccacctgtgttccgaaagacaacaagtatccaatgagccaagcatcctccggcatctcggctgagacaagaaaagtcccgtccgcctgcacagcaatctcgtccgtttcgaactcatcataaacccgataggccaattttctcggaaaccgcagaaccagcctgggataaacttcagaaacaaaatgacgagattctggaaacttgacagggataaattcttcctctaatagctctaattcaacaatacgattaaatttaaatatacggaaatcctgcttatctgtgcaaaaggccttgacataccactccttagccttaaacatgaatttgaacggttggattttccgtttgttatatatgccatttgaattgacataagtgataacaaccgctctatgatttaaaaccgcctgcttcaatagttcaaacttttcattatcatgcgttctgcttccccaacgtgaaaaatccacctcaaaccaattctccgattgaattttaaaaagtgccgataacttcgtcagtagttccttttcataggtgttatcaacgacagccaaactctgtaaagcagctaagagttccagcttttctttttctgaaaataaagttttatcaagcacatacgtatctgataaataaattccgccattcctgccaatttcagcataaacaggaattccaactccactcaggacatcaatatccctataaatagtcctgaccgacacttcaaattcttgggataattcagaggctgttgcatgtcctttgtcaatcagataataaacaattctgaataatcggctttccttcatatgtcttttcccttctctttccccaaatcttcttttttatcttcctcaagatttcggttgaattccaacaactgctttagaagattgtcttttaggctgctatcctttgaaaaatccgcctttctaataatttcctttattttatcctctctgtccattatgtcccccgaaccattctatgttcttatcgtttcataactttacgctgggctatttatatcatactataatattttccagtgctaaattcaacgtattatcgcaatttaacattaccataatttaccattctaaatcccatacaatatccttttcctgtaaattagtcgtttccaaaattgaacttataaaatttatttcattttgtcacttcaactactaccagtctgccgcttgtcacttcaactactaccagtctgccgcattttccgggaacttctttcgcagtttcagcataattcggtgtatcctggatgatacggtactttcttttacgtgaaggatatgggatatctccctatttgttttatcctcataaaactttagatacaaaagctcccgctccttatccgaaagaattgacagcatctcatataccgctttgtttgcctcatcggtcagtttcttccgctgtgtatcaaaatcttccatcaaattattttcaaagtctttgatatcaagctcatgcctttttgcccggtaataatctatcagggtatttgccgcaatccggttaatccaggtaccaatagatgctttcttttcatcatatgtatgatatttttttattactttcaaaaaaacttcacttgttaagtcttctgttatttctttattcaacagcctgtaataaatataattgtagacttttggataatatttttcgtaaataatctccaaaagtctactatccatcggtctatactccacttcttcccaccgcctttatttttcatgagtggctattttatattataaacagataatatgtcaataatttaccaatatctataaaggcagctttttatatgaatcttggatatacctacaaaatgaaaccgacaattgcaaaaaaataagggtggccgaagccaccctctttaattcagcatgggactacatccaccaaaatatcgcgatttgtttttttgacaatcacgccagaaaaggtatcccctaattccttcaactgtccctgtgttcccctttttatttctttggcgaggcctatgctgttaccctcgatcattgcaaataaaaaatcgtctttccgttcaaattctattttctttccaattgcaatatcatagtcatccgcaagcaaaactaaaattcttattttttttgtcatatactatccttccatttttagaataacggatatccggttataatccggaatccccaatcagcattttcatctttgagtaagacgaccctggcccttgtgagttcctggtataacatctcatccccttttttatatccataaccaattgcggttgaaaatgtctttgtgagacacaaaaagtcatccgacctggtcagcagccagttttgtatccgttcttcataatactgtttcatcatacttcgtacaattgcactggctatccgtacatcccgaaaggatgtggcatagcggatatcttcttttgttaatcgcatttttaatatgctgggggttatgtttgcatgtttatttaccacatgtccatcatacatatttattttatcaagattttcacgaatcgtcagaagtgtcctctctattatttcctgcggtataccctgaaataaatcaaccataaattaccccttcctgccgtgttggaacagagggatacccgtacctaatggacgggtatcaaacagcacatagtaggtagtgctacccgtccataagtccggcttatattatgatttatcgttttttctcatacacagcttagaaaagcatagctttacagctatttcctgtgtatacatacctgttttaatcccattaacataatgctggatggtttccatgcttctgtctgcctcttctctgctaagttttgggatataggttctgggatttatacctagctcctgcagcttatatccacacgccactttataggccaggcggtaagatcttaaaagtaaagacagtgtgccgatggcattggccttgtcattctgcataatcaaatttgcctggtggaataattctgtgttattacctgcactgataagtttaatgagttcaaatacattttccttctcgtttatatgcacagtattttgcacaaactccagcgttatttccccttccacggcgcacaacctgtcaagggcatgtaccacatcaaaaagcgtgacctcgtccatatcataattaagtctttccatcaacagatcataggctggtttccggatacagcaccctctacctttgagcctggttagtataaaccgttccataacatccctggccagtttcttatattcctttatctctttcggctgaaatgctttgtataatgtcagtctcctatccacttcgcctgcaaatatataaatatctgcctgacttctttgttgttttaagctcttttccaactgctgatccggacgcagtttatccatattaaggatcaggacccttttatctgccagaaatggactttgcataagaaactcctgctctgcctcaccgaactcttgggaaatcaaaagattaaactctggcatctgcacggaagtagtaatctcttttttcaactggtggataagatatggttcatttccaaaaaccaatgtcttactcatacctgcaccccctgtaaacatccacatattctaacatctctttcagcagagtgctcctacccgtataattttctgccagaaacaaaactttttttgcccttgtcatcgcaacatataaaagccttctgtcctcttcgatattatccctttcgtattcttccaatccgactaaaattacgacaggaaactccttgcctttgctgtcatgggccgtaagcatatgtacgtggtttttgggcgccggatagtgaattcttgtatcgtccctgaaaattttaatcgcattcataagctggtatagttcttctgcgctttccattcttctctcctctatggcctcgatcagccacttctccacttcacttgtttcaatttctgcgtcaaaaaattcacctattgcctctagcacgccctgctttaaaggcctgtggaaatgctgcagggtacgataaatttttgaaaatacctgctttatctgcccctcctgctcaaggaaatagcaggacgcttcctcgctgtcaaatgccaatatctgattctgacatattaaatcctgatatagggtaagattcctgtctttcttcactggtatataatccatcatatctaaaagacagtataaagcctcatcctcatccggtccaatcacccaaagtgtaagtaaatgaagcagggcgttaaacacatagtcatcacgcagatagtgctttggcctgtccagcgggatctctttttccattctgtcgcaaatttttaacaaatcctgatttttgcgggcaattattgctatatctgaatagcgataccccttgcctgtcagatcatgaaggagtatgcccagtttgtcctcatgaaatttctctaaatacactggctttttatacgatttgtctgagcgcaactgaatcggtattcgttcctgatttttttcaatcagcgctgtagccgcttccacaatttccttcgaggatctgtgattgtgtcctaatttaaagtccgctgcacctggaaaaagttctttaaaatgcaccatgaaataattggtacctccacgaaactgatagatggcctgatcagcatccccgcagatcatcagatttctcttttctgcggaaagcagcgtgacaaattccatctgcttctcgtccagatcctgcgcttcgtccaccactatgaagtccgtctcttctcttaatatatcctggatgccttggttttcgtgcagcagattgactgccataggaacaaggtcatcataaacaacaaatccctctttgcgagacatctcatcataaatggatttaatgcgcagaatcccatctgtatcttttttaggaaaagcctctataaattttccagctccatttctgcggataaagttaaaatcctggaacagggaggatataagaccgtagggcaaagtaagtccttcatagctggctcttattttaggagcaaactccagtaccttcagcaacagcagcatgctgtccacctttcccactagttttatttttcccaccagggtttcgtaacgccccagtatctcaaaagcacatgcatgtaaggtgctgatccgaggtttttcttcccactgtatgcggtctgaaatctcctccgctgcctttctcgaaaaagtaacggccaggatttttttaggaattactccgctggatagcagactttccatgcgtgcaaccatagaagctgtcttcccgcttccgggacctgcacatacccttgccggccccgtcttatggcagattacattcctctgttcatccgaaaaggtaattttatgcggaacatgctgtcctacggaaatctccggtgattgcttcatatacacattcagcgccggccggcatatcttctggtatctgcagtcattgcagccgcaaggcttaatacagcttattgcttctgctattctttgcggcagcttcggactgttctttagttcccctgatgtaatagaaactatattgtccccccttttcgtctcaaattctgctaattcctcaccatccgattttgaaaccagggaaaccatctgtacttcaatttccctacccggaaaccttttctgcagagctgccatcagaaataatagctctatatcattcaccactttattttccggtttgctggcacggtaggaataaggcctctgaaattttcgacagataatgatgcctgtcaccttctgctcaccatgctctatcaaaagatctgctttcgcattgacgcctgttatctctatgttcgtacagcaatgtcggtatgggatatgacagaacaccccgcttgtaacagtatctctttcctgaatatgaaagttgtccagaaaccgggataacagctgcatatccctttcaactgccgttttcttttgccaggataataaaaaccagccttcctgataattttcttccaaataccggcggatactccggcagatttctcttttccccatgccctctgccaacgcactgcacatcctggatattgcttcgctaaataccaggtactttcggttaggagtcttcaatgccagcatttgaaattcatatttcttcttgcattccgctaatatgcgcagctctttactatttattaccatattttcctccaaaaaagactgcaggaaagaacctgcagcctttcaattatgctgcggaaggaaatgccatatccagtaaatgaaagacatcatccattgccgcatccagaataaacatacataccacccaattaggatccaatgcatcaaaatatatatcagactcaccgttaaatcccatattaaatgcaaaatactttattccgttatatgtatctgatattgaatctgaccagctggccgtcaaagggtacttgatccgattaagcagctggtcgatacaatatattttttggctatattgctcggaaagccatgcctttttatcctttggcaggaaattatataccgatacttttttattccaaaaaaatattgcaccattgttttcatcaaatcctaaagtatcatataaaaagcccatatcatttgttgccatattaatctcttcgggagataaatttatggattttagatagctctgcataacttccaaaggtatttcgcctggatcaaaatcaagaaattcatcatgttccctgtttaaattaaaccatagcgtctcccattttagcgcctcgcatgtgctgaaaaataaatcccccgcagaatttacgtaatccgcaaggaaatcttctgaaaaataatcctcattaaatgaagtaccgaaaaagcaccttggcttccagaagtcaaagtcgaaaccattttcttgaaaaagcttttccatataccgcatagacagcacggataaaaagaatccttcatcccaccctgtgggatagcaatattgggccagccgttcaattgcatggtcatcaaatggagtgctatcagcatattcccatgaatcaaccaccattttcatcctccaatttaaaaatttcgtaagccgcatctagaagtttgtccatcacaaacatattgatgccaaaatttggatgcagcctccgcatactgttttcattccatccagatggcactgttataaaagccacaaaataacatcttgatgccagcactgcataactgtttccatttatatcctgtatcgggttcttaatcacctctaacgcggcttctattgcctgatcaccctgataaaagctttcccgtatactttttcgatgatattttttgaaatgaagatactctccaagacggtaattccagaaacagtacacttggaatacaagatgttggtatttattgtgaaccgcatctaacagtcccggaaaatttttgcatatgcgccctacttcctccatattactgccctgcgctacaacatagttccatccgggccactgcataatcttttggaacagcgttttgcctgcctgctcctgcatctcaaacacttttttcgtctgaatcttaccaatataaattagagattttggcatatataaatccacatccatctcttcactaaacttatcataatactggaaatacaactccagcagtatcgcctggttttcattcagactgttggtttctttattcaattccctaatagcagcttcgtcaaatggattcctagtcatgttcaatatcttctctaactgcatggttcctgatcctcacctgcccactcctttaattttgaaaagcccttaaaagcatcaaacaggaataaaccgcctatcagcttcttctctgacagtatggttgccacaatcatcagcagcaagttggcagccataaggtttgtgaccagatgctgtggcgctgtctcattcaatacctgacagctttcctggctcctggatacagaatcatccgtcaggatgtccggaaaatagtaagtcctgtctggatacatttcgatgccgccgattctgacaccgacagcaacttctcctacgctaaattcattggccgagtctacatagatacaggtgtccgtatccttaaaaaactcatgcatcactcttcgacaggcatggttatctgccgcaccgatcaaaagggtcactttactgtcatctgccagtcttgccaaatcttccttactgtcaatatagcggtctacataggagcattttaccccgaatgtctggcttaaaatctctgcaaagacctccgccttatttctgccaatgtcctcttctaaaaacggctgccttgtcagattttttttctcaactacatccccgtcgatcagagtgagctgatagctttcatcggtatacagggagtacagaaagcgcccaaaatttatcaggaaattcccaccagtgccgccagtgccaactacgataatattaaacgctgccgccatacgctcctccttttaaatcaaatatatcctccaactgcaaaggcacatatttccctgcaatccctgcacggaacgcatagttttcctcgtttgtccctacgcagccaattaccatgtaaagctgtgtgcctttttcatccgcatcgtcagtgcctgaaaaaaaggccggcaatcgcccatgactatgaatgtccatcattaatacctgggtgctctcccgctcatagcttctgtcaaagactacggagcttttatcccctttctgatgtggctgaaacagatggtactttttttcttccggatgaaaaaaaatctgcagtgcggcctcctttccgggcgttttacgcatcacatgctgaaccctatgcaggagatgtcctggaactttaggacctgtgaagataaattcggcatcatctttacaggaactaaaaaaaccgtatggagtctgttccacacggcatgcatttccttcgcgatcttctacaaagtatttcgcttgatttttacgttcgctgataattttaaggcctttgcgcgagccaatcaaaatagccacaataaatcctctttcatcatactgcatctctgtccgttcttttgtatattgtggttcatattcttccagcttatttcgcagttcctcaagagttaccacatctttcccaaagtcacctttctcaaattcataggttactccgggaatacggactgttgccggaagcgccacatcggttacgtccttccttttaaaattaatgattggaaacaaaagattcccttcttcctgatacgaaaattcacaattttcatattcgggagcatctgttctttcgcagaactttttccgaatgtcctgaatgcttgccttgccctcttcatcacattccaattcattttctgtaaatgtaataatctgatccagatagcctacccggattgggcagtcataccttgagcctgccgcaacatttgctgccataaagggcaccaagatcctctgcttctcatcataataaaatttacagtgcataaattcactatgtaaagcacacaagtctgcttctatttccgacagctgcttttcctcttctatatccatactgtagtttcctgtaagcactgtggccgggaactgaatcttatcttcttctttgatttgacggtattgaaagtccattttcaggaacgtctttatatcttccgcattttccggtatttttgttggtttaaacgctaccagagcaatggaaaggccggacagttctttatacctgcttttaatgcggttttttatatctttttctgccattgtttttccgtcatcttcttcccggatatccattgataaatgccccgcacatatccttataggcaaatcataccgttttccgctttgttttgctttccctccggcatccgtttctccagtcttcttgcctgttttttcatctgatgctttctggtttttcttttggacgtcctccattgtcagcccaaacatacctaaaataccatcatccgggttcagttcctctttgatttcctttgccatttcaaaatcctccttttattctgataataagttgcccaggcattttttccctgcagtttctactaaccattcgtcaggaaactcctgatacgcttccagggtctccaataatttctgcagttcagtttcctgtgtgctggaagctcctgcctgataataatcatcgttgcagggagtttgtataaacagagctacatattcatttaattgttttaaatcctgcaatgcctggaacgcattgctgccccagcaaaccctgttatcgcctgggtttacatttccaaatggataataatacagccttgtcctgtcattcggtctgtcatctttaatcgagtacacgtaagtgccgttcaatctgctgttataaatctcaaaatgaaacaccagtgacgggattcccacttcgtattgaattcctttgtaattcatgatctggcgtcctgatggcaatatcgtcactatttttgcatttaaccgttctttatcacggtagattttaccatcataatatcctcttggaagctgtccaatccttgaatactcccactttctttttacggatccaaccaacgcatttaagagggattcaatcgttactttccggtttatctttgtaccatcatcatggacgagcagaacccttgcaaaatctatcatttcttttctggactcttttgtatcaataaatatctctgccctcatagctcctccttctacagcgccctgcgctttatacctgtgtattcttcgaacttcttataatgcttctccagtgcaggcgtcatataatactgggacaaaatagcataggattgattgaagtaatatgctatatcttccagagagcactcccgcaatgtttttttatcacctgccagaagcagaaaaagctgcttcaattccttttttcccacaacatcctcctgcatttcttccatttctaaaagattcttttctaatttttttccatctaatacaatcataatacctccgaatctagtgggcaaaattgcaataatttaatacatagtcaaatcccagccctccctctatatatggcctcataacaaaatcatacatactcttatccatgattttcagcctctgataccgattcggctcttcctccaggtggcagcccatggcacaatagacacaacccgtcctctgttcacccgtggtataatagtttcctgcatcatcctgcaggatatcaccatatacagagcagatttccagatcgttctcaataacgtatcgcaatacgtcctgacgcctccaaaatcccattggctgtgatttagggtcattggcactatatacattgcagccagttttattgtatttgcgctgccgcataaagccttcatcctgggtgatacctatatagggtactctgccagtctctttttggtactgttttaatggcttttttttcatcacttcacaacatttttcactaatctcaaaaggggcatccagtaaaaacttccaacattcagcaagttttccataactgccccgctcatccccatataacaggtaattgcggtacctttcactaagatcactattccgaagcttccggattttgcatgcggtctccttgctgatcagcggatatccgtatttccggatcacctcccggaaattcatttccggtttcagaacagtaacattgtcaaacctttgaacaaactccttgatctggggaaactccaaacccgtatcgacaaagaccaacgggattttttctcctaatactttttctagcatatggaccattaccgtggaatccaatccaccgctgaagcttgcatggaccattccatcataatagtcataccagtcccatattctggctgccgacaatttaagtttcgcctcatatggaaggtattttctctgtgcaaactgccagtcctggagttttaaatcaatgtccctgataaacacatgtctccccctatcttttcttcacatacagatagttcaattcagccacgaaacatacccggtacgctttcatagcttcctgcgtctggaaattattatggcctggaaaatgcggatgcatcaaaatctgatggacatacactgtatcatccttaaattctgcctttccaaactcgcctatccattcattcgttaccactgtaatcggaattttcaacatatccatccaattaagctcttccataagtcctcctttccactgcaactccttttttgtaaatataacaagcagctctcctccttttcgtttattgctatgtaaacagacaccctatttctttgtgccagtaccagccttctttttcccatcagtcaaaaaatcatatcttacttcttctcccaataaaaaaaggatatagaccccaacctcgaaagtgaaggtatttccacttccctccaagtaattgttgatccacatccttgctatttttatcgccgcattgcggtttcctatgattttcccttctctaagctggcagtcctgcatcatgacagtttccgccacatcaaggggtataaattcgtaatttaaagcctgtctgtactcttccaccacctgcatggcttctgataggttttccagaattacagcagcctctgtttcatcgaagactaaaccgtcctctatggtctctgcctgccgcatcccctctacaagatatagaagatatagggcaagcgacatatgataagcttcatatgtatccgacaaattaatcccatgcttctgtaaaaactctaacccgatcatgtacttttctcctctcaatattctttcctttcatttttggttccatataagcctccttttatgtaaataaatatcaaaaaggcacccaacagattttctgtcagatgcctcttttatcataatattacctgtttccaggaattttaccattgcgttcagcccaaaggccttataattaaaaagatttaaaatatattttattataaatcatcccaaatgcattgtcaaaaagtatttgattgttacataaaaacgaaaaacctcaactgtacatacacttagttcacagcatgctcactgcaatggatatgtattattccaccgcattggaatcacttatacatccccctgtatttccatcccctttatctcctgataagaacggattagatgtttcacagctttaatctcaaatggagacaatgcataaattatctgcaaaatttcttttatctccgtatcttcttcaaactccagcaagtagtttggtgaggtatgtaactctctgcaaattgtcataagcattgacaacgatggcatcttataaccattttcaatttgccccaaatatccatcgtgcatattacaacgatttgccaactcagatcttgtcaactttaaattttttcttttttcccttagctttttgccgaatttttttaaatccattacatctccccatatctaattgatatattttatatccatcagtatacttgcatttctgtaatggtggcagtctgctggttgatacttctaatatcagatagatatcattagttttttttatgatttattttaagtttgattttctggcagaataaaataatccatcaaataattcacaagtttcaactgttcaggcgtcaatcggtaacatttctcaataatctctttcatttccgcatcttcaacgaaattgaatagatagttaggtgatgtctgcagactctcacagattgtgattagaagcggtaaagccggcagtttaattccgttttccacctgatttaaatatccttcactcatatggcacaatactgcaaattcctgagtagagtatccatgttctctcctcttttgcctaatctttcttccaatatttttattgtccatttactcgccttctgttcttatctaattgataatatctatacctattagtatatttcacagaattaatttacgatagagcgctgtttgatatatctaatatcaaatagatattattaaatttattaattaacactatttcaaaaaattaacgggtaaaactaatgtcaaataatgccataaaatgcgatttattttagtagacagatttagtattaggtgctatcttatctattagatactatttgtatcaaatagataataaaggaggatcaaaatgtcaaacatgcaaatgccagaattatttattaccctgttggggagcgactatcgaaaagaacatattgaagatgtctttcggaccactcttgaagaactaaattcccgaagcaggcacaatgagttagaatacggagaagctgctgcattttgggatgttacacaagaatttttatctcaagtaactttaactgttaactgacttttaaaaatacaaaagatggtgtttatataaaagatagaccttagatgtctccggacaaagaacttctaaataagaggcaatttgtctggagataattactcatacggcttacgaattgtaataagaataaggagaaaactatgtcctttttaatagataatgttatggatttaaacatagaccaagtacgatttgaagtaaccgatgcatctgctggggagattaaagtttgtcttactcttaaatttaaaaatgagtgcgaaaaactcaacttttctaacctactgtcattctataataacgttaatactcattctccggaacccgtgccgctaaatccaagcagattagctcatattatcatacattggcacccctctaaaaatgaccttagaaaatcagaagttatatctgatcttattaaaaaagtaaaatcccaatctattggaacctattcatatgtttgcagccattcaaaatatgaacttgttgtttcacacgaaggttcctacttatttgatttcttaagggaaaagaagtatcggcttataccttaaaaatagacacattatacccctgcatatcctactgttattgtatccgaaattgcaaacttaccggacataatatcgtggattatccatattgcctcttctgcattttttctatctcactctgttccatgtaccgttctgtaagctctgtggctttatcaaaaatggaaaaggcctttaagaaaatctattctactaaaagtccgtaggttctatttcagagcctacggacttttgcattacatagtattcattaaatccagtaatattttcttttgctcgttgcttatagtactccatatttttaacaattctttctgttcctcattcagctcaatagggtcaccatcatcagagaaaaactgtgtcaatgttattccaaacgccttacatactgcctctaaagtaggcaacgtcggcgcattatttcttttgaaaacgttggcaattgtagattgcgacaaatttgattcttttgatagccgatattctgaccagccacgttcgtccatgagctgccgaatacgcttttgtgcgtccatattagcctcctccaatccacctctattttacctttcaaaaagatggtacaatagtcacaatcggtatgcaaattagcgccattttggaaggtatcatagtagtattatgggctattccaggaaaaatattggcggcttggggtctcgaccacttactccgcttgtatcctaatctttgaccgtagcacagaaaaaaagcaggctcacatttttttccgagcttgcttttttatatgttgcttatcaattccagcaatatgtctttttgtttctcattaagtttagaccactgaatgaaaagtaacttttgctcctcggttagaattaccggctcatcatcttcggcgaagaaacaggacattgttattccaaaagccgcgcaaatggaaacaagggtttcatatgtgggcgcattatttcttttaaatatattcgtaatggttgtttccgataagcctgcccttttagccaatctataatttgtccagccacgttcgtccatgaggtgtcgtattttttcttgtacctccaagttctcacccctttttacgtactatactaccattcattttggtggtataatagtcacaatcggtaaggtctataccacccaaaaaagcagtaattgaaagataggaggaaacgcaatgacaaatttttgctactatggacatgacttggtattaaatcaaggattagaaaggaaaatcaccagcagcattaagaaactgctcattcaagacgacagttttactttttacttctttatggaggatcagttttcatcgtgtatccttgcagccgttagagaactaaaatcgaaacgtaaaaaccttaatattaagactattttggttgcaacacataagagtgttgacaaacataaaaagtatgatgaaatcatacttgctccaaatatgatggagaacgtacattttactgtaaatgtgaatagagcgcaaaaatgggccatagaacaagcagattatttattgatgtatttatatccctgtattagtgttgcgaaccagcaaatattaaactatatatttaagcgggcatctgccggtaaactgtctatactggatttaactgatgatagtataatacctataatcaacgagcaatttccgttactacgggaaaggcagaaatatgttcatgaacagctcctgtcgggtaaaaatgccaaggagcttgcaatggaaatgtctattacaccaaggcgggttagtgagatttataaagaatcttgtagcaagcttttcaatttaacttgtcgtgccattaaaaaccagcaagaacagatggcaaacgaataatcaagaaatgaggcccccaaatattttttttgacttccattacgttgctgagtattatgcacaatctgcaaaccgagaaatggaagtcctaataaaaaaccatataaaggaatttgaggaatcctacggagaaatagatattgattaatctttatactaagtaatctctggatgactaccgatagtaatgaaattatttgagaagaaagctcaataaaagccctgcaaattccattttagaatctgcagggctttgtgttacatgatattttaaatccagttgcgctggagatgtaatgagtttaacgatcttctctcctccaccatcgcaattaatcttatttttgttgatgcatctctctaccaatataggtaggagaacctaaatcatcatgtatcttcttgaatcggcggtttcacttttaactggactaactgtgcaattttcctatgtacgttatttcggtaaactatattatcatatcgtttgacatgtgccattccaatccccaactgtttggccacctgatccggacgggcatcataagcaaacaagacagcgccgcaggtattccttatatccgcataactcatagatcttattcctgccttcttacaaaggtttttcatcattgcacaaatatattgtgtatttaacttcgctccccgggtattatagaagagatactctgaatcagaatttatacgatacgtttccaaatatatttttaaaattgtccatacgtcatccggaacatatctgacatcatttttgtctaatataaaataagccccatttggatcaactataatgtcagatattttctggttacaaacctgagtcgatcttaaacccatacgatgggcaattgcaagaatagcgtagtgcataatattatcctttgccgcttccatcaacttatccagctcattcagctgaggcaagtcctgcaaatcttcatctttaaaatactggattgcataaatataaaaaaaattattaaagccatctggtataagactttccgtctgttccgtaatatattcggagaacttatgtaattcttttatttttttcttcattgttgtgggcttcagattttttttctgcactaacttcagtaaataattatagtatttatccgcatctccctgatgaaactccagtaaatccttttcaactacctccatgcattgattaatatcaccaaaataaacattcggtgaattttttgatttaaatctttctgaaaacccatcccaaagttctcttgtcaacggggacatatacttacatggagctctcataccctcacctgctttcttgtcattttcctatattataatgtgctttttataggcaagtcaaatttttaggcaatttttttccaccggatggaaaccataaaaaatgtggcacattataatgtgccacacgtaaaagtattgattttatcatatttttttaataatatatgtgttacaagtgttacaattatatttttcgtttaaagccacctccggggctatttcaattgccggattaatctaaagtattcagatattcaaatatctgtctgttatcatggacgataccattttcagcacatattcgatgaaacaatctcattaaactattgtttcccggactgttaagctcatattgattgccataagcccgtatatacttttctttcatacgtgggaatagttggtctaattgcttgtaaaaatattctcggcttccctcgcgcaaagtcagtcccataccaaagcaaataatgccgtaaacttttgcttcaatgcagtaattcaaaatgcctgttatattttccaccgtatcgttaataaacggaagaatagggcatagccatacaacagtaggaatacctgcactatgaagttgctttaatacttcaaaccgttcccatgtcgtgctgacgttaggttcaagttttttgcacaagtcctcatcgtaggttgttaaagtcatttgcaccacacattttgttttatcattgatacctttcaaaaggtctaaatctctcaaaacccggtctgatttggttatcaatgtaaaaccaaaaccgtattgatatgccaatgataatgcttttcttacattacctatttcattttcaagcggaatataggggtctgtcatagacccagtgcctaacatacactttgttcgtttccgtttcagtgcattttctaataagtcaatcgcattttctttaacttcaatgtcctcaaaatcatgttccatgtgatagcatttgcttcttgaatcacaatatatacacccgtgagaacagccgcgatacaagttcattccatttcttgccgataaaattccttttgcattaacaaagtgcatagctatgtcctcataaaaagctactcaactgaaaaacgtaagatggttttgagcttacttttttctactctttttgcgttgttcagatagatttccctgtgccagctctcgttgcgtttcagaccgtttttctctgcaagctgcaccattttttcaaaagaagcaggctcatcatcaaacgctccgatatgcaggatttcgatacatttatcgtcctgcatggcattaaaacggatgtcctcatataacggattgggctttttccttttcacaacttccaatgccgcgcctaccatgctttcggtaataaaatccggctgacgtatcataatggtgtattccagttcttcctttacgagttcgtcgccctgcttttgtttccataccccctctaaagggtaaacggaaaagtcatgtacctctttagaagcgtcggcattggttgcagaagccttataacccatttttatggcataagctaatgcgtacaatgcggcaaccttgtttgaaaaatcttcgtcgttcggattgccctttccgcttatcatgatatagctctgcgtaggtacggtaatgatagccgggattggttttgccccgtacagatctttctcgtgctttttccattcgtgtttcatcaatatgcacctcctgttttagcaaattatacaacatataacttgcaacctaatgtcaggttacatattttttctgcatggcggctaatttttctttcacttgttcccggacatttcccggttcaaggacttccacataatcggcaaaggaaaacaaataactgtacagcgcgtcattgccgggtaaattcgtctgaacatacaaatttccctgcttgtcctctgtaacgtcctctgcaaattcatcatacacacgaaaagccattttcttatcaaatttcaattttacggctatggtattttctatatccattaactttccgacggaatatgttgtcggaagttcacgggagtaaacgtcagcttgtatttctatatctcttatccgtgtcaatttgaaaaagcgatagtcattacgcataaggcagaagccatataaataccagtctttactcttaaatactaatctcaacggctcaacccgccgctgtgtacttgctctattactgccaaaatactgaaaagaaatgacattacggctaaaaatggcactcttgattagattgaaaatatcttggctgggatcgtttttaacccaattagaaaaatccacttcaatccagttcgtagttttcgattgaaacaggctccccaattttgtaagtaagtcatcagcgttattttgttctgtcgctataatgccctgtaaagccattaaaatctgttctttttcttgattggataataaggatttatccaagacaaagttatcaagtaatgtgataccgccgcccttgccttgcaccgcataaataggaatccccatgctgctgattatatctatatcacggtatatcgttctgacagacacctcaaatttctcggcaagttctggtgcagttgattttcccttatccaaaaggaagtatataatcctaaacaatctgctctcttgcatttttatcacctctatgccctattataacgtataaaacatgacaagtctaaaataatatgctctattactgtcaactctatgctatgtgcaaaagcaagaaatggatttcaaaaaaactaatcggtagcactttagaaatgtaactttgccccatatactttggcggcctgttcttgacgcggtttccgctctgtgctactccatcgggccgcgcccgattaagcgtccgcaggacgcgtagccagctccggcacggagctgttcaagggggcttgggggcgttgccctcaacaagcagccagcgcggttatcaccacgctggagcctgtgtgtattaacacaggcattgcttgccgttcgtatcaggaattcctgatactcgtagttatcaggaattgtgagttatcaggaatgctcttaaaaatctttgatacataaggctaaacacacaaaatattcctgataactttttcgatttttacactatttcaaaataatcctgtctgtttcctcatttatgaattcctgataacccagagtatcccttacaatagaattgtaattattctatatgtaggaggtgctctatgaaaatcgaagatttgtgtcagcaagtcataagggctatgattgacgcaggatacacacaatgctgtgcatggtcccgttacagagatttctattctcccctgatttctttctatcacagttgtggcgaggatgaatttagccttgaaatgatggtcagatacagtgagtattcccatgccaggatggaggaggaaaaaatctgcgaacaccgttattatcaaatcaaggacggaatcaagcggattattgaattccatgaaacagggaaactgtattggtcttcccaggccaaagaatcaaaattccctgtcaatgagtattacagcggcctactggatcaattcattgaaagtgagaagttccatacgaatactcgtggggatgtaatctgggcttccaagcggtatttctcctggctcatgcaggaaggatttgcggatttgaatcgtgtcggcgtgacacagattcagaaatatctctgcgaatgccatgaccatttaaaagaaacatctattcataacatactactctatctgaaaaagctgtactgcttcttgaaagctacagggtattcagaccacgattacaaagtattgctttccatgaagatatgccgtgaaagcaaagtgcttccagctgcaacaccggaagatgtaaacgccatactgaatgtattggatatgagttctgtgactggaaaaagggattatgccattattcttttaggctgggtagtcggcctccgggcgattgacattatcaggctgaaactgactgatattgattggaaaaaaggtgagatcagagttcttcaaaggaagacttctgtgccagtcattcttcccctgacaaaagatgtgggggaagccctgcaggattacatcttaaacgggcgtcctaactgtgattatcaggaaatctttctgcggattcgcccaccgttccggccatttaaggatgctgtctgcattggagaccagtatgatgtttattgctatagggcaggaattaagagggtgccgtttgatgggaagggattccattcactgcggagggctgtcggaaaaaacatggtcacatctggagtgtccgtgaatactgtcagtcaggttctcggacatacagctatgaattctgcgaagaagtatatttcgctggactcaaagaacctgaaagagtgcgcccttgattttagcggaatcgaggtggcaaaatgagcaattatgccagtggctttgcccctcagatagaagccttttttgatttgcgtgtcgcactcggccattcccccaagacccatgctggaagtctgaaactgtttgaccagtattgtgccgcagcctatccgcttgaatcacagcttacagaagaaatcgtacttgggtggctggaggatagatgcaccgatgtttatgaaaaagctacaacgatgcgcctgttgggccagtatcagtgtgctgtcggacaggcagcctttgtccttccggaaaaatatgtgacacaaaagcaggacttttctccatatattttttctaatgaagaactaagccgcctgtttgcagctattaacagaacccggccgtcaaaagcggaaccatttatggatgagattgcccctgtgctttaccgtatgatttacacctgtgggttgaggccacgagaagggcgtgagcttaagacggcgaatataaatctcaaaacaggggaaatccttatcgcccatacaaaacgtaaaaaagaccggatggttgtcatgtctgatgatatgcggaaacttgcggtaaagtacaatgaaaaaagggggattttcggtaagtcaaacgaatactttttcccttcgtggaatggtggcggcatgacgcaaaaacaggttgactattatctgaaaagtgcatggaaaaaagcaaatccggattgtagacagttgccccgtatcagaacatatgatctccgttatccaaacctttataaaatccaaacctttgttcaagaacctccaatttatcaggaattatgaaaaaaaggtttggatttattttatatatttttagtatccaaaccgcagaacgatttcagagttccgtccgaattcttccatttcggtgtcacttttttatcgttttcatcttctaacgttgcaagtgccttcgcttcatcctccaaggtaatgtcaaggtatttcattgtggtctgaagattttcatgtcccaacagaaaagaaatctgcactacattcatcccatcctccagccaatgactcgatttggcatgtcgaaactgatgagcatgtagatccgagggaacgtcaggacagattttgtgagcttgcccagcgtatttccttaacatttttgcaatggcaggctgcgtcagtttcccatagaaaccggtattcctcgaataaaacagatatgcttccggatctggttcgttcccgtggaattctttcaaatactttttgatatggcttatcgccttgggaagaagatacagggtgtgtaccttattccctttccctatgatagtggcatatggacggtctccttccagatggagctgccggtttttcatggatagtatctcatcaatcctggccgccgtcccatacagcacaatcataagaacaaggtctctttgaccggttcgtgttttggcgtcaggacagtccagcaacgctttgacagcttcttttgtcagaccgtttacttttttcttctgcaccttcatcagcggaatcatgctggactcatggaaaagataaaggtattccggttttcggcttccgagataactgaggaatgcacgaagggagccaaggcggatgttgcatgtttccgggctgcatccacggatattttttagccaggcgagccatttttcgactacagggtgttcgaaatcctttttgcccaggctgcagggggtggcattttcctccgtctcaagaaagtttatatatagaagcagtgcataccggtaggacttcaatgtattggaactggctgtcttttgggtgggggcataactgtcaaggaacgtggctatataacgggatagttcaattgcttcagcaggggctttcttcatcgtctacctccggtattatccagtcaaaatcatcctgtgtcatttccttcataaggtctgccagccccggaaccagcgaatagtagtattttgtgctctctattgtggtatgtcccatgcttttgctcaaatacaggagtttatcatgaaacccaaacccattcatgacccattgattgatattttcaaccgcatattgatgcctgaattcgtatgcagtagcatagatgcccggattcgtactgtcccagattttccgaaaattcttctggacccagttcctgtcatgaaaggtattattttttcccggaaaaaagtattccctgtctggatatacgcttccgattgctccatcatactgcctcatcaggcagcacatcgaatcgtggagcacgatgtaatgctggttgtgtcctttggaataccgtatattcaagatgccactatcaagatccgcgtccttccgtttcagcaggcgtgcctcagttgtacggatcccactgctgtaaagcagacggaaaaatacgggaaccgtatatttccgggagagtaccagtgggttcgctggctttgcagggagagtatcacatgcctggaaaaaacggcatagttcttctcttgtaaacgcatgagggatataggtacggcgctcttttcttgggatttcaggatcatttacacaggtcatccccctttccctcagatagcgcaccaggcttacgactacataaatacgggaacggcaggaattattctcttctgtctcccgtttgcggcaccagtgatccaccatatcctgtgtcagttcttttgtatcagggtgtttccggagacaatacctgtcaaactgaagaaggtttattgcataagaagcctcattccaatgctcagaggcttccctgtaacgaataaacgcctccatgtatggcgcaaggtatgactgataattcagcatggtaataacacctcctctgacactgggaattccccaatactgagtgcgcattccttcagatggacaaaatccgcccgcaggtacggttccagggaatctggcgtggtatgccctaaggtctggctgataacaggctgggaaatcccattttccagcagggatgaggccagattgtgccggaaaatatgtgtccctttccggtcgcctggctcctgacggatgcctgtcacccgaaaaatttttgccgcaatgttgccaacagaccggctcgaaaggccgcagcagggcctgctctccgtaaggaacagatgtctgtcagaggtatctgttcgctccatggagagatagtcatagactgaattcccaacaagcggaataaggggaagtttcacagaaatccctgttttctgttggcagatacatatagtttcagactgccagtcaatagaatccagcgtcaaagctgcgatatcgcagctccttagtccggtgaacacaagcagtaaaccaattgcccggttcctgagagaaaggggtgcatcttcgtttcggaggacatccattacgcttaccagctcatcttttgtaaggtattgtatattttcccttctttccctgagcattggaaggcaaagaaggatccgtctgcattctgtctcgttataggataaccctgccttgaaaacagcagagatattttttctgtaggagcagctttttatgagttctccatttccggaacgaaagaacgatatgacggcctgttccgtgattttactcagagtgcggcagccgttttcctgtaaatagtataagaaggatgccgtattcaatgcctcacattgaattgtcgtcggctttttaccgcgaatcccctccaccctgcggtagtggtcgatgagtttctgatactctgaaaccagcaaatgataggatcctcttggaaacaggcagtttctttggtggctgtttggaaaagaaccctggatgtcaaactgctccagtgcggcaatgatgctttttctttgccgaatggcttctttagattccgtattactgatacggctcaggaatatgtcctgataggaattccaggtattattagctgccctggcaagaacccagtttatctctgttttgaagtgtgcaatgtagtcattgctgtagccactatccttgagatagtccagcaattcaggataatgctcttgtaaatgtagtaagttcatataattaacctcctcagaatgatttgggtcaattatacaggataaaaataaatccaaacctttttcactgaaattcctgataaatcggaggttcttgaacaaaggtttggattttataaaggtttggataactcaaaaaatccaaacgtttggattttctccggcatcgctttgcttctgccgcattgatgcgctggattgacaagggggaacttttgcaggcaaaacttccgtacctccgtacatacatgggacatggcagtttgtcagaaacggtgcagtacatccacatcctgccggaaaacctggtaaagacttctggaattaattggggcgcttttgatgaaatcataccggaggtgccggaatgggaaaaataaaagacatagagctgtttacgctgatacatgattttttcaaagtgtatctgccgaaccagcgcaaatccagccctcatacaattcgttcttatcaaaaagcattggattgcctgctggattttgctgccgcacagcatggcatttcattgagtcaggtcacctttgacatgataaacagtgttgtattatcagatttccttgatgagcaggagagaaatggcatctctgtttcaacgcggaatcatcggctgaaaggcatccgcgctttttattcctatgttgccatgagaaagccggcgttggcaatccaccagatggagatttataaagttccattcaaaaaggcagaaacagttacgaccattgactacatgagtgagacggcgatgagcgctttattggcgcagccggacgcaacggataaaaagggattgcgggatcagtttctcttacttctcctatatgataccgcagcaaggatccaggagcttgtggatatcaaagtgtgtgatataaagcgaggaaagacatctacggtcatcctgcacggaaaaggctctaaagtacgaactgtcccgctgatgcaaaaaaccatgcagcacttcgagaattacaacaaagtctttcatccaggtgaagatgagtattccgaacgtccactcttttactcagtaattggacggaagcaggccgcattggaggaaagctctgtaaggaagctgcttcatgcttatggaactgctgccagggaagtgtgcccggaagttcctgattctgtacacccccatatgttccggcatagccgggccatgcacctgtatcagcacggtatggaccttacgctgatttcccagtggctaggccatgcccagttagaaacaactttaatttacgctcacgccgacacggagcagaaaaggaaagcgattgagcaggccacccctgctgacagcccgctgaaagctcatctgaacgcagagaaatatcaggttacagatgatgaaatgttaaaacgactttatgggctgaaatagtacaaaagttatcaggaattcaaaatcgcattactaaatgtatgacagccttcaaaacaggaattccctaaaagttatcaggaacttatttatatcaatccttgtaaaatagggctattttcaatgggttcctgataactcacaattcctgataaccgctttcttattcccgcggtactgccttgaattttttgtttgtattatgacagcatgcacatcattttgcctctggagtgaggtataaagtatgatataataacgatactagactgacaaagtagcctgcaaataaaaagtcaagcaaaaatttaaagaacattgaaaactttatacaggttgaaaagcaggtaccaaaataagaccgccagataatgccggtctaataaaaaggtatgtggtgattactcagatgcggacaaggatgcaaggtattcttttacccttccgtagtagatgcgcaaaaacttgttggcaccggctgtcatgtaaacatagtagggcttgccctgcgcacgtttcttgtccatgaacagatatacagcatcatcaggcttggttttaatgagaacatccataacctgaaacagagtcttccgcaaagcgggagaaccatgcttggaagcatgaacgcttttctgggaatagtctccagattcgttgacaccgggatctactccggcaaatgcagtgatggcgcctttatgtgtgaatcgggtcacatctccgatctcagccataagctgaggaccaagagacggtccaacacctttcattgccattaccaccggatattccggtaactgagcggctgtttcatccataagtgaacgtaactgctctacggtctgggaagcagcatttagttgttctatcgcctgtttgataatacgtttggtaaaatcatctttcggaagtacaggaatcagttccttggcagttccatagatttcttcagctttcgttttgctgaagttgtacttcttacggctgcaccacttttggtagtggtcagtaaaagcttttaaggacattttacgaacacaatcgacatgccagtaggtgtcaaggaaatctacccatttctggctgccgtcctcacgggcaggactgtcaaagtaggtattggcacccggataagtctggtcgatgagacaaatcaggttgtttttcattgccgttttgtgtttcatatagaaatcaaactggcggttcattgttttaagctgagcgcgtatttcatccataagactatattgtttcagctttgcccaactgtcaagtgcatagcgagcgatttttacggaatctgccttatctgttttcactctgcgcagaggattaccctgtccttggaagctgcagataatctgagggtttacggcacttacaaagaagcctgcctgtgacagtgtccgggcaactggttcatagtagcgaccagtacactccatgacgatacgggtttccccatccagagaatgcaggagactggtgagcgatttgaaatcatcagccaagtgtggaatatcatagggctttacaacaacctctccaccaggacggagaactgctactgtgctttttcttttggaaacatcaatacctactgcgttcatgttcataaattgtcactccttagaattaatgattgcaatggataagtaccagttttactcattgcctattcaatctactgtggtgtgacacgaacgcaccttgaaggtggatcaacctgcataaaacgaacgctgcgaatgaggagctggctagcagactattttacgggcgcgaagcccaggaaaggagccgctataccgattgctccatcattatacagcttaagcaacgagatgggtaattccttactggctgtaagggatattaaccataaatatattgtagtagaaaggagggatgaatttatgctgaaatttaaccggcactatcaccccttgacttcccgcccctacctttccaattcctcctacagggaatatactccatgcgaggccctaaagccatatatcgcctgcttttgggagtcggaactgtgcagggcacaagccaaagaacccaaacttttggtgacccctgatacctgtacggatattatcatcgtaatcaatcgtaccagacagatagtttacggacaattgtgcggtcttgatgaccagccgatgtttgtggagcaggaatgcaacgaagatattaccaaaatcgcaatacgtttttatttctggtcatttcatctgttctttcatgtggatatgggggagattgtcaaccaggtatgggatatagagctgattgctccctctatcagatgggagtgggagcctctgttttatatgaattcctcaatggagcggataacctgggtggaacggtatctattgggaaagctgactgagcgtgagagctgcacggcactgtacaattcaatagatcgaattattgagacggccgggcgtgccagcttgaaagagatttgtgaatatagttgtgtaggtcagcgtcaagtccaacgtctattcaataaaaatattggtttatccgcaaagcgtatctcttgcttggtacgatatcagcatgtatggggggatatggtaaacggtgagatgttttcgattcaggaggctgtatcccgctatggctatgcagaccaggcccatttgctcaatgagtttaagcgtttccacggtgtgtcgccaaaagaagcaatgcgaatcgctttggagaaccgatgatatccgtactttcgcacaagagagaatgtcgtttttttccaatacagctgggactttgtttggtataattatatcgcaaaaaagtgtagacctgccgatgagaaggcgcatagaggccgaccgatgactgggtgggctttgatgcgccttatatcttttattaacaaaagtgtgagaaggagacagagcgatgaatcaagtatcaaaattttacgagattattaaaaatgagatggctgtgacgcttgctacggcattcaatcaaagggtcacaatgcgcttggttagccccgtatattatgaaggcagcattttaatttttaccgcccccaattcgctgaaatatcagcaactggagcggaacccccattgctgcattggagccggagagttttttgccgaggctaaggcagaatttgtaggagcaacgatgttggataccaatgaagcgttccgaacggcttattgtgaaaagttttccgatgctttcgaggaaggtgttgccttgggtggcagagacgcagaatttatactactcaaaccaacgaagttaaggggttggtcttatgaggatagcatgccaacaattccgtttgaaatcgaaatggatgactgcatctaacgccactacaatctcagttttaatggagagagattatgggaacagggattgttatgtgcggcttaaatggaactggaaagagtacacttggaaaagcccttgcagaaaaattgaagttccattttattgataatgaagaattatatttttccaagacagacccctgctatatctatgcttcttctcgcactcgtgaagaagttgaaaagcttcttttcagtgagattaaagcacatgaaaactttgtctttgcttccgtaaaaggagattatggagaagctatttatcctttttttcagtatgccgtattgattgttgttccgaaagatattcggatacagcgagttaaaaatcgttcttttcaaatatttggcaatagaatgttgccgggtggagatttacatgagcaggaggagaagttctttgattttgttaaatccagagaagagagtgttgttgaggaatgggtacactctttgaattgtccgatcatgcgagtggatggaacaaagtctattgaggaaaatacaaagattatcatagagcagatacaaagctggctgcaagacttttcggctgatgagctttttcaaccgggaacgaaaatgggcgcaatccactccgtctaattggcctatttggaaatgggttcatatcaatacagccgcaccctttaagacctttcggagcaaaatccgcaagtggaagaagttagagcagtactttaaattgctttcttgagaacgtccttgttagagaaggcgcgttcgacaaacttaaatttgaaaacggaaagagaggttaaacatggtggatatagaaagtagtattatggctacaaagcagggatttgaatatagcttttcttcgagagatttttacaataaacagacacaagatgaatatcatttgaaaaatattcttgattttttgccgattaaagctcatatgaaaattttagatttaggtacaggaagcggctatttgtcttttcctattgccaaaaaatattcaaatatatcaataattggactggatattgtcgaaaaggcattagaagtcaaccgttttaaggcaaaggaagaaaatatccgaaacattagttttataacctatgacggcatggattttccattttctgattgtgagtttgatatggttatttcaagatatgcgttacatcattttccagatatacagaaaagtatttctgaggtcagccgagtgatgaagcaagaaggcttcctatttatttcagacccaacacctaatgccaatgataccagtcgatttgtagacggatatatgcagctaaaaaaagatggtcatataaagttttacacaaaagatgagtggcggcagatatgcggaaaatatggattgaaattcaaggaatcttttaatagtacaattcggtttccaaagaaaaaagatacagcctatggacttgatgaattattgaagaaacatgataaagagattgttgagagttatgaacttgaagtagtgggaaatgaaatatatataacggaacaggttaataatattttgttttgcaaacgataaatcccagcttgtcggatagaaaaatttgaatttggagggataaaatggataaaccaataacaacattatttatgctaatgtctgttgatggaaaaatcagtactggctctacggagaatatggatgttgacaaagactttcccaatattatcggtttgaaagagggcctttcccagtattatgatattgagcagtctaccgatttgtggtcgttaaattcggggcgggttcaggaaaagatgggggtgaacgaaaaggcatttccacaaaagacacctgtatcgtttgtgttggttgacaatcatcatttaacagaacaaggtgtacggtatttttgtgcccggtcaaaaaaatttgttttagtaacaagtaatgagaaccaccccgctttttacattgaatcagacaatctccatgtcatttttcaaaaagtgtttgacccacaagaaatgttgattaagctgaaaaaagattatgggtgcaagagaattacggttcagaccggcggtacattgaatgctctctttttgcgggaaggactgcttgactatgtggatattgttgttgcgcccgttttgattggcggaaaggaaacttcttctctgatagatggcgcgtcttttacacatgaagtcgagctggacaaattgggcatattggaattacagagttgtgaaacgttagcgcactcttatctgcggttgaaatataaaattgttcgctaactcccagtgctgggactggaaaatttgaattttagtgccacttcggcgaataagacctgcttaacaaatttctgaatggatgagggagagataataatgaaaaagataatgggggcattgataatttgtgtactgctctttacaggttgtaactctgttgtgcctcaaaatggagatacaaactcgatttctagttctgcaacacctcaaggtgaaaatgaaaacttaaaaaaactaagcaaaatagagatatattctatacagagcgacatacttatgcaaaatattgataatcaagacaccataaacagacttctagaaacggaatattgggaagagatagatggtttacctgacgatttaatacctgaatacaagttgcttgtttatcaagagaaaactttactattagggcaagaccctaatgaggaaagagattatgaactcattgaaacaattacgacatttcagaacagttcatatattgaggaagttatatcaagtgaagttgtaaaaaatacaataattccagaaaacgcattgactttttattattctcttcccgatgatatcgttaaacaattacaagaaattatcgaataagacctagtttattgagttggacaaatttcagtttgtgagttaagaataaaggctaaggttaataaaaaaggaaaaccttgactctagcgtatcgtgatagtgtattgtaataattagatagagagctcactatcaaaaccaagtggaaagggtgatgtcatatgaaaaaaagtttggatttgagcagatactttggtcttgcattaaagtcattttttggaaggcaatagtttttgcaataaattgatgtagcctaaaagatatgagaaatgcagcaaacaaagctgtccagagaagaatgcatggaagccttgtcgttcataaaaaagaccgatttcgggaggcagatatgatatttgatacggaaatcaaaaagaacgaagcggtcagatttaccgtcgtcgaagttccctttcccgcaagagaggtatttcacaagcccaaagggaccattttagtacatggaactataaatggtatcgcatatcgcagtaaattacttgcccgcggtggcggcaagttcgctatggttttagataaggctatgcaaaaggccatcggatttgatggaaaattcatgtctgcgcatgtaacgatggattctgatgaagcggatacttgtcggcggagcgtctgcgagccgccgaccgtaacctgtgaaatggatgtaatcactgcgatcaaaacgcggcaaagcgtccgtaactttacatcaaaccttacagccatcccgatccgccgccacgtctccatctcatatacatcttgtaaagtatatatccagcgaatgccactggaatgccccagccttttgctaccaataccagacctatgataattgctattataattagaagtatcttttcttttctgcccattatctacctaaaaaaattcctcatgcatacgggaagtaacgctgctgagtatcttgaccgaaggattttcctcttttggctttacacttgttacccggatcatactatctttcaagtcatagttactactttttagcgctccttcagatgtatagtaaataaatggaagcattttttccgggaatgtagagcaaatcatagtactggcctttttaaagtcctcagcatcctcacagacaataatcaaatttaccttactgcccttcttttcattgttttctaagtatgctttcaacgcttttacctttttacacagatatccttcccattcagcatctgtgaagcgcttatgatccaccctgaaaaacaatggttccaccaccgtcatatattcctgatcattgattctatgctgcacctgggcgttgaacgtaactttgcctgtctcactgtcataataggaaggcataaaattgtatcccgacagaaatgggcttttcatcagttcagaacttaccagagatgccgctgcccgttcgacgatctccacaggagggatgatatccttttcatgcctggcatccgtatttaattttaatgcctggtaaatgatcttggaaaattccgccgtcgtgctgtaaagcacaatgttattgccatctttttgataaacaaaccggcggagcattcccatactgcacattttcttaatcctgctcagaagcccttctctgctgatgtttcgcgggacatttttctgcggccatagatttcccagcgcaacaactgtatctgcaaccactttgggaatcgtaaatttatataaggatatagaataggcaatgaataagtcagaaaccgttatttcctcgctccggtaataaaaagcaattttatccagtgcatttttacggtctgattccggcacgctgatttccatttcaggctggtattcaaaaaggcttttatagttcatcagggacacgatctccctggctgccctcccctgctgttcgctcattctctgcgttctcctctccatatgtattcttcatattatccaaagtcagggctttaaacaccctgactttaagggtcctttccggtatattcatggcatagattttccccatatattccatcccttcaataatcggaaagttatggtcctttgacgggtattcggcaaacacctgtatatcctccaatccgttcaattccccaaaccagtgattttcatgctttgtaaggcacctgatacggacaatgtcctcctgatggtagcgctcgcccagtgttttatcctcccatgggtcctgtaccagttctttgcgggagcagttataataactgacagattcctcccctcccctgccgcgcctcgtcgccttgtctaacacaataacttctatcacatcaccataagaaacttttcctcgcagcgccggcgtaaaagtggcattccagttcccaatataaacaaatcccagaagtcctacaccgcaaaggtcaagccacactccggtatccacagtttctccatccaatattctcgactgtacccgaattacttttccttttatccgaacctgggcattcttttgaagcctgcggtcaatttcctcttctatggaaggcctgttttctattcttgcagcgttatggcttaaatagacgattttattctgctgatctatgtccgttactttgaccaggtatgtatctgccagtttttgagatttatagcgcaggtcataacgtttcccgtttatttcctctgcgtacatgcagagtgtcacatttttgtcaactgtggtaaggttcccagactggtccacccggtcaaacgctatagtcaggtacttgccgctctccatatgctctttatattttcctaatataccctcgccatccgctatcttgactgctgttctcttctcatcgcccaaaaacatatttgaaatttcatataaattatccattttaaaacctccttattatataaaaatgctcactaattttgttatcccaaacacaaaggcaaacagaactatggggattgtaatcatcatcccgccgattgcaaatttcctgacctttttatttagttttgccgccgtggcaataatcgcacctaaaaccagcgatatgatacctataatcaatgcacctgcctttattgccaccaaatgcttataaaaggaatttgcaatgcctctgataatgcgttcgccaagcgggccttttatttctatttcctgctcctcctccagcgcatcaaagccctggtcccaagaatgttggatactgtccctaagctggtcgtacacatcactgcctgtccccgaatcctttccatacacctgcaatggatgaaagcaaaaatttaatagaataaacagaacgctgatcgatattatttttttcataaatcctcctgaagcatctgcagaacatcaaatccccctgtaacaggctgctctttccttatatccgctcgtggcttctgatatggttttttttgtctttccgcaccaaactttcctggctcgcaatggcgcaggatttctcccatctgctggaaaaattcatttgaactgcatatgggaatcagggtccctttgatacctaactctgcatttatatcaataaaatcgctcatcttatcaaaaaccttgaccctgtcactataagtaatcagcgagaatatatcctcttcaatcctgtatgacatacccaattgaaggttattcagcatagtacagagtgttttcatctgtttattcctccgctgataatctgtctccagcttagttgggtttataatgcacaggaagccttccccgtcccgtttcgtcaatccgtccactatcagactaaaataatatttccccggcagctttgtaatgggatccagatataggttccaattcgcctccctggtaatcatataacttcccaaagctatgcccatcgcctgaatgattgcactttcatgtatggtttttttaatggggcgtatgtaatactcaataagccaaagcccaatcacagctcccccaaaccgtagcgggtaagcatacattttttctataccatccctgacggtagttgtccgaaggcttgataagtcctgctcctgagaataatggtttctgaccagcctttctaaaaagatacgttcatcctctgctgtctccgccagtgtagtagccacaattctcaacccccttgcatccaggcagaatattgtatgctccgtttcggagaaataacttccaacaatattcaccatttcctccagcagttccggtttcatcgggctggtgcttattaactcaagtaaattattaaccgtatctatcactgatatcatcattttcgccctctcctatttttttgatgcacgctacctggtgtaaaacgtcttctgcatattctattggcagcgatttgaacatcctattgattagatagtatttcgtcacgccatattctgctgccatctcctctatggttttctgtccatggcatatctgcagataaccatataaactgcggatatagccggcattatagatacggctgagtccaagttcgctgctcatacgctccagcatcttacggtacacctgcttctgcagcggtttaccctgcttattcacggaaaggtagtcctgcaaaaccgattgattggttctaatgacggggattctctgcaatgcgtaccaggcaagtgacagtctttcattttcgtttaaaatgacttgtactccttgaaccatgatattggttctgacccggatattcccctggtcacaccaatacacatcagataaagtcatctccaatatatcctgtatctttagcgtactatgcaactgtaaataaaagcacggataagcccctgtactataagttttaatgtgattttctaacttttccaattctgctgttatgatttttattcttcccgcttctgtactcatcagtgccacctcctgttccaaggacaccgttcatccacagtttcctattgttctataaatgtaatttgttcaccgtttacctgtgcaagatagctgcaggttccatctacaatgccagcagcctcggcggctgaaaaaaagccttctccatctgcccttgtcctgagatatatgctcttcccggcggcttctgccctcccagctatatctgcaacctctcccccggtaaaaattcttccgttataatcctctgatgtggatggcggctgtgtgggggaagccggtggtggttcctgtacgccacccgtctctactacaacattgctctgactatcattgggctgtgaaacctctgcctgattttcagtctgttgcattggctgtgaggcctgaaccggttctgtagccggtttttgttgctgcttttcctgggtatccggttcttccgattcttctgtcggtttttctgtcggcttgtccttctccttattatctttgctatctgtcttaagattgctgtcatcatctgtcttcggtttttttgactcattttctgttactggcttcttactttttttatctgtggcagcagcttgtgtcccagaatccatctcctgctgagcgctcccctgtcttacagcaggctgttctgtctccatatgtctgtatggaccaagtaacaagaaaattcctattaccagaaaaataaggactgacactaaaatacctaatataataaaaggcttttttgattttttaaccccatttgtccctctgtttttctggatcttatttaactccccgacagggacaggttctttttttaccctgggtttagccttttcatcaatgttcttttctctttttggttctgccgctttttgaaaccctaataaatccgatatatcctcttccagcagttcttctgcttcaggtttaaattcttcatattcatcaggagccgtgccttggattttttcttccatagctggcctttcgggttcacccaaatctgaagcttctgtctttggtctgctttccgggacaacagactcctgcatgtctgtgtcaatcctgtttcttttccaatatgatttcttttttctccgaaaccagtgcttttttccgcatgccaattcaaaataacgctgatattgcggcagatctgtcagttcttctcttaaatataccggtagaatccctaccagttccatattctccgcactgttcagtctctcaacagaaaatttatacctatttgctgccccttccatagacccgccatttaatatgtaatccgcatatttgtctatccggttctgatctacgatattcaacacctgctcaacatcgcttaacgtttttatgccgtaatactgcctgcagcttttccggtttctgctgttaagcatcagattaataatcttctccgcagaagcatcctcctcatacaaggcatttgtaattcccgcagcgtaaagaattctcatatacctgtcaccatagtggtttttgttcagcgaaataataacattcagattccggatatcttccagctcagccagatcttccgctgtataggggctggaattctgcagaatctcctgaaggacaacgatattgtaatcttcgtgttcctgtaaatattgatacacgccctcttttcggtaccttgaaataaaggataattccagatctctttttgcggcagcttccgtcagtttctcccggattgatgcgctttcttcattagagaaaccacagactatttttaaaacctttttatccatttaactatcccctttaattttggatggtcgcaaagacattgcagtcgctaataagccattcctcgttgtgtttctctaccgtgaattttaaatattccaggatactgttactctctgctgcagaaaaactaatatccgcttccattaccacctccaccttattgttagaaacctcgctataataaagtttcatgctttgcagctttgatatgaccggcagcggatccggtatcttatccccttcttcttctatcacaagaggcttaaatttttcatacccggtttttgtcatataggcatccgcgccttcaaaataccttctctccctggtgtcgtaattgaagatagtatctgcaaacccgttcagaaccatttctattttactttcgtccgtaagtctcctatctgaggtttccttctgtttttcctctgtcacagaatttttctcctgatgtttattccctgatgcaaagaatatcacccctgcacacaacatcagaaatataacgataccgctaaaaatgcccaatgctcttagcctcattctgacctccttctatcttttctctatatgactatatccttccaaatcctgctaagtgatccagtaaatatccgcttaaatctgcttcaatgactctcccctgcccggaacttgcatgatagatccgattatttcccagatatatacccacatgtgttatgtatgtcccagcattataagtacctgtgaagaaaaccatgtcaccggcaaccgcctcagacctcgaaacccttcttgtggcatcgtattgttcctgggctgttcttggcagattatgtccgattgcacggtaacaaacctgcataagggcagagcaatcaattccgctcgttgaagttccaccgaatacataaggaactcccatatatgcctgcatagcatcttccagagaatcaaaattatcaattccgtctgggtttgttatcgtctccagcttagaacggacgtgctccacatagagaacatccccataactgctgtatccatatctggcagccatcatagatgagaaagccctggctgccgcctcactgtgcttgcccccataattagaggctatgtatccaatataaccgccgccgaaattatacgcctggagtatggtgtcaatatcaacgccggcatttttcccctgggttaccagtgagctgaaatacttcacgccctgttcaatgctttgttttggatctccaatgctgtttggcggaagtcccatgctctcggagcattgcataatatctggataccggtctgagtcaccgccgctttcctgcgctatcatagcaagcagcagttccacatattccgatacgccatatttttctgcataaaactctacatcatttctccactgctcaacaagcggggatacatttgcccgtccaaattcagattcattgtcccagtcatcacagccggtcaaaagcaatgcaagcatggtacagatcatgaacagggataatagacgttttttctgcacctgactcctccttcgtagttaaaatatcggtttatttttctcttcaattattttcctgatactatcttcaatgtattcccttgcggctttatgctgccctgtccctttttcataagccgtatctatctccatcttatttaagatgatctctgtaagcgcctccgtctggagcttaattcttttttcacgttccatttcagcggtgacagtgattgactcttctttcatggaagctatatatttttcagcctcaatgttcgctttctgcatggccttgagaccagcgctgctcctaaaacctccatcccgtccaagcactcttgtgatggctcttgccgcatctttatgtatctgttgctccatcctcacagcctcctgttctgatagattaggcacaggagtaccagcatccctatgtggcggctccctatacccacttgccggggacggactgtgtggtacctgggcactgccagtattccctgtataaggttctgcctcagatacagatgccccaggcacaaccatttcctctgtcaccgaagaattctctacgcgattctggtatatccgccttccggttctgcctgccactgtgatgaagtctgcggcatagcccccaagctgtgccccgccggacatgcctccagccgccatcatcgctgctgttgagcttcccataaaaatagaagacccgccgagtatcattccgccggcaattccgccgcccagactcatggcagctttcccggtattaaccaatgcccgtctcttatataactcctgcttttgtgcgttcgagagcacattctggaattcaggctgttcaaagttactgatcgtcgcccgctttgctaaaatctctgctctcttgtcatcaaatacagtcggaactccatttctccccggtccctgaaggctcttggactgtcttcttaaattattcagttccctgttttcatccgcaatcttcttgtcaatcgcagcagtccgcataccaagttccgctctttgccgttccatctcgcgataggagtcagagcctttatcttcatctaacatctgacgtcttagtttccggtcatcttccattattccagctttttcggatttcaggctgtctatatgctcctgttttttgtcagcctgctcatccaattggcgtaaaatctgcgacctggaaggcataggacggttttcactttcattcaggctatcttctgtttcttctgaagcttccattccaccatcttttacactcacatcttctgcggaactgcccatagaattattcttatcagtctcttctgcgtggacagaccccgtcttgccatccatatctgacagttcttcctctgattgtccgctttcttgtgctgtagtttcttcccctactgaatgaaccggctctatatcagatactatatctgcattttcctgttctgcactctccatttcttccggatagccctcttgaccagtcagatcatccaatgcggaatcattccggaactcgccatcctgcaatccgctaaactcctctggcgattcctcctggaaagtatctcctccttcaaaatcctgctcatcattattttgctttccaaaatccccagtgccagagtaggcgctcagaagatcattttcttcttccctgtccgcatctgccaattctttatgggtttttctcttctgtgcatcattatatatatcgctgatcttccctacaccgctgcggatgccgcccatcattgcacgtccaagcgtcatcaatgccatagccccaaggattccattgcgctcgttgctctgcactcccagcaaaattttaattctgttcctggctgggatgattaagacacacatcacaagctgtatgatagatactccccgaatggtatctgaaagcatcatactcgttaaaagcgggatcagaagtaaaaccgcatcaatcaccggagttataacatctgacagcattgtcatcgcccaatttgatatcaggtccttcttcttactgtggaagacacacaaaaatgggaatcctacaaaacaaacaagcatatctatcgcgattgcaacataaatgaatacgaaatatattgtgaggcctacggttcccagatacataagtgcatccacaaaagttccacttttctcggcattcaataaaaacgctttggaaaccgacagcgtagccccgcctgcaatcatctgtccggttacctgctttattccataaagcagtatatcccggacatatagcaccacatccaaaaggaaaggcatcagcatcaaaacagaaaactttgcaactaataagaaaagacctgttttgatttcctctctgcttttggccgtctgcccggtccaggcagatttggcaagcagaaaaacaaagttgaccgctaagaggatgaaaacaatcccccgaaggatactataggtcaccgcccctgtcactccatatggattgcccagccttagttcaaagctatatatatttacccggtcaggatagccgctcccaacccttccatatacaatgcggtccagtgatgccgaaatattcttctgcagtataccaatcagactgcttgccgtatttctcaccagctctgcaaaatatttttccaccctccctggctttttcgcctcgatatcctccggttcttcctctgtgtcaatggagttggaataaatcgaattatcctgcgtaccctttagccacggggatgtccccggaaaagcattatcgttgctctcatccacttcattttcaatagagtcatcagcattagttgcgtatacaaccgtatgcccagcagttaaagcgaaacatagaatcaaaagacacagaattgttttccattgttttttcatcccttacacacccctctgctcacgtatacatcttttggatgattcgcgggtccgtctcaacaaagaccgcttctgcacttttcaggtaatctaccttgcagaaacaaactttagaattatcaacgatacatacttccccttttctctccccatttttcttgtccgatggatctccgcccaattccaatagccgctccacctgaatagtggtcaaattcacagcctgacgtatccatgccttatcctgataatcctgcttaaaaatgaactttaccgccgcctgttttaagagcgcctctgtttctggcatgcgggcatagtcttttaatgcctgagttgccgtccacaaggacactaaacgcttacgggatgttcttgacacattgtccaggctttccacagctaatttagaattaaagttctcgtgtacctcgtcacatatgactcccaatttctccatcttcttcggattgatggcgttccgcttgataaaccgttcgtttacaaaattcaggccgataagccttccaatggttctttcctctgaagggagctgggagatatctatatttgtaaaccgtacattgtctaaaatagtaatcgtactctgcccgtcataataattttttacccccttgatacagataatctttgtaccacaatggcacatagcgcctgctttttggtattcttctcttgtgtaaaatttgaggcattccgggcagtaatagagttcacgtacccggtctttcaaactatccaaaataatgcggtaggcgctggtgtgctcagcaatctggttagcctggtttcggataagcacttttttataaaagtcggataaggtgggtagcttcttttttatcttcccactggtaataactccctgttccagcccttttccaatttcatataaactttcaacctcgttatccctgatacccttatcctcgtagagttcgcagataatatccgtaacaatccgttctatgtaggtggcggtctggaagtcagccttctctttccctccctgaatcaatatcattaagtcacttttggcttccgtgattttatcctgcaggcgcagaaccatgtaatcgccatttaattcgctccactcttcttcctctacgatttcaaagggatttataatattgttgctccctgctttaatctgatagttgatcccgcacatcacatctgccagcatagagtattcccccctgtctccctttgcctgggaatctattgccacaaaccggtatccgctctttgagatacatctggatgccaggattttgattgtcgcagattttccggtaccagtcataccggaaaatattacattatagccattatgggatggatcatagcaatcaaaccggactgctttccacgttgccatatttcgacccagaatcactccatcctcatgattaaagtccgtctgtgtatgattaaatatagaagcaatacttaatttatccattgtatggcgtttcagtcccggactttttacaggtcccatcctcgcatcaaaccggtaattcaacggcatccctgacagaaatgcttctggctgtaccccatagcagcaggatatgcctatctgtttttcttttgccagattccggaaagaatccgacaggtagttcaattcctccagactgtctgccataagagtgaacagaaaatagacatgataaaatctgttctctcctgtttctatacgttgtgcccaggcctctgtctcccttaattttccatttaatttgcggatcatattcctgttgtagtttttttccgcgctgataatattggtttcaatctccacaatggtattgtccaacaaatgcgacgcttttccctcagacagtggttctatgaagatggatgtggacatacggccaaagttaaaaaggctcggaaatgtggatgcaaacacagtcctctttggcaatatatccacggtaaaacttcttacatagatatcatgcccacaatcatttaggaccatataggacatggggtttggatttatgccgtccggagctgctatatgccttgccgcatttacctttttcaccttttgttccagcagctttttcccattatcttttcttttggactttctttttttcaatatgaatattatgataaaagtcatccctgctgctaagagcatcgctactgccaatatggcgataatagccagcaggttccctctgttaaactccatattctctcctttccccggaaagctctttctccacttcctgcagcacttttttattcacttcctgttccatttcctgaagcgttgcactggtgacggctatgctgtcatatgcactctgtacaatgtcctctactttatattttgctgctgacaatggatgcgtgtacctacgcatctcttccagtatttccactccggtcatcatctccgctttcacgccggcgttccgtagtgaattaatataggcttctgctttattctttagctgtctttctgctttggcataaatttccgcctccgtaagttccgcagtgaagtccagagggttgtaattccaatccaggacatagatctgatccaggtaagggtctgcctgctccatagtctccgcataactgatctgcgcctgcagctggtcagattgatagcctagtgatagcagttcccgctgcatgcttttcaggcgcctgtaatagatatcataatcggcaggggtaatttcctccctttccgattcctgcctgagatcttcataatccatctgaagcaggaaccgcttttcattcagctttgtcaggcactccttataggaattaatcgtattgcttaaatccacttcccgtgcggtctgacggaactggatggattggttgtctaggacattaaaaaaagtgatgtatccacggattgtctgaagtttctgctccatctctgcatcctgatatccaaagccttcacatctgatagcggcaataaatcgctttttctcttcggaaacaaccatatattccttaatgtcatcgaactttgtgtactctagtgtgtctcttctttcaaaactgctgtaatccgcagctttttcaataattttggaacgccgtatcttcacgatatagattcccaaaagaccgaacagcagcaggcatacaatcacaacagcgctgataatctgtatattccgaatcaaattatctattaactgcattttcccctcctttagccactaaactaacagatcgctgatgagcttacatattccaagccataaaggtatactgaaaagcataatcgcaatcaggccctttactaatgcctcttctttgacttccgcttttgcctttgcgctggaagtaaataacatccgtattgccatgaacaaaatggaaaatacaattccaattattccaacggtcgtggcaagcgcaccggcagatgatgcgaagtctttgatggaatcaatatcggacaaagaggaatctgttaagtacacccaggggtcaatctgtttcggggcagtatcggaaaaattataaatactgtccccctcctcatccccgcacccggtaacaaaaaaaacacaaactatacagatcaggaatgcaagaaaaatctttttctttttcatattccctcctccggttcataatttttgacatatattacccggttccgcctccggataataatccttaccaggcattgttccaatgtaataccgcctcccgttaaaaacatagcctctattggaagctctatcatgataacggctgcaacgatgagagtaaaaagtattgccgcaataatagcaggcaccaaaaaaccatggtcgctggccataagcagaaaacggtaatctgcaagcagcgtcagtaccaaaatgaccgcctgctttttattaaagtaacggaaccacttatcttcgtctttatactctctcggaatcttaaaaacacccaattttgccatctgatcctcccaaaaaaagaaaaggcagagttctctgagaactccaccctaacctgttttataatcctgagccgattgatttgaaaaaaccaatgattgagaagcagctaaaaatgacaactcctgcaatacatataattaacacatgtgattttttctcctctttcttttgtgcattagacgtcatcagaagagaaacagctgtgaaaataatagaaaataccaatcctataattccgattgtcatcatcagctgatatccgcttgaccctatcccctctattgtatctattagggacgagaaaacaccatcatcccctccagagttctccatgaaatcccattcgttgccggcagcggcagcaagcagggttccatgcagcttggaaggtgcacaaaaaagcaaggaaccggctctgcacaacaagttgttcatgtgcaagcctcctctatctattatttttttttaacacatgtgtttttattatcttaacaaatcataccaattcgtcaatagcagtaaatttcctaagcagtacatggattccttactattcctgttcttaacagaatagggcaatgattgttatatttgcgaaatattttctattatatatgaaaaataaaaaaagcagtatagaaaccattttacggtctctatactgcacttttaatacaaattgtcagattttgtcgttttatattattcgtctctttttgctggtataacaagcactttatcctttgtcttggaatcttttctgattaataccggggataaagttcctccgattaccatttccacgtcctggctttttccaaacacggagatggcctgccgaagtaatcttgcattcagggcaatctcctcaaacttaccgtcttgcttcacatggatccgggtttttcccgtccctccttttgtctcaaaaagtatctgtccctcatccagatatgatattttcagatacggctcttcacattcatttgtgatatcaaagatgtttagtgcattaataatatcgcttacagatatctgtattacagagcactcttttaccttatccgttgttccgataattgcatccagcggataagccgcatcgctgctgtctctggttagaaaaatagccacatcagacaacattttaacaaataagcttttctcatacaggcagaaggttacgacctcatcgcccataatacggctcacctctttaaattgctccccttcgattacatacaccatatcatctgcatcctttttatcaaaagctgcttttgtctctgctatgccgattttaaatccatcgctggaaaccatcgtaacgctttcgttctttggtgaaaaccgaatgcatacactattgattatcttgttgctgacctggctgtaaaatttgccagcaacacgaagcatcctctcaaaatcttttgttgccatggttactttttgcttaatatctctttcaataggaaaagtctttgcagactgtccaagcgcaaaatgtgcttctgtgcctcctcctttaatcaaacaatctttcccgatttccatcgaaatcggagcacttgtggcgctaatagcattggctatgtccataattttctttgcatttgggtaaatcgacgccttttcctcttccatttccagatcctcaatttttatgctgctcaatagctgcttttttccgtcaaaggcgataaccacgccgacagatgcgttttctaccttatgcttgctgctgatattaaaacttatgcagggctctttgacttctcctttggctttctgtgccggaaccgccggaaatatttttcccatagcttctgcaagttcattactgctcactgtaaatttcatatgtaatcctccttcaatcataccttacattccgaaaaaacttaatacactaagttgtccctgaactactttttggtttctcctacttctttgtccctgccgcctggtgctttctgtatcttccatccggaatatttcattctctttttcacatactgacatgagcgttccaagcatacattcaaacagataatccatctcatccaaggaattttcctctgccgtctgaacatcttccgcctcagtaaccggattctcaaccacctgggtatcttctgtctgcacatcttccacctgttcttcttcctccaggatcgcgtcatcgccgtagaggaaatccatgatatcctgcccgtcctggctggttacatagtcagcgataaagaagtcataatcctcggtacagtctattcccgtaacctcatagaatgtcagcatcggcttgtagtccctgtcacggtttttttgattgttggctgcattcaatatatcaaacatgcctttgagtccccgctcctgcgtctcactcttttcagcgactgcctgggcaagcttgattctggcatctactccctgcgccatagcgcacagaccctcggaagagaattttccttgtattgcaagcgttgctacctgcttgcttgctaccaaggacaccgcctccggctgaatagtcctctcggataccaggtaatatgttctgcactcctcattttgattcaatcggtagtgtctttttgcggcctgccagattgtaaacatatcatggtccatctggtagaaaataaccgtcgggtaattaaaagaaatcccatcatagtcaaatcggaaatccaaaccagttttcacgcaccgtggattcgtaaggaaaacacgaatcccttcctttgccttcttatgaacccattcttctcttttttcagcaggtggataactgctttccaacacagccactttcccgcgcgcggccatacagttgtttaccaacacctctttcaaacggtggatgatgtttgcatctccagaacctgtatagttacaatagataaatacattgcggttttcagacagttcctggcttaccagctctactaatttcctttccttattcagtatcttcccatcctgaatcagatgtgataaatccgcgggttctgcaactacctcgccagtcaacgggcagaggattggctccctgctatatggcttgtctgaataagacagagaaaactgcagatagcttcctaacaaagttctgccgttttttttcatcatccgctccactatgatttctctgacatgtctgtattccctggcaatttcatcctctaaaggcacaaaaattacatcttctttcagtttcggcagatactcgctcatatctgtcagacacagaaatactgttccttccataagatattctgaatagatcaaaggtgaaattcccggccggcattttggcgaccctatcagctttcctctggtgtttgtatggaattcaccatcaccgtcactcacttcgtattctgtctctattgttccatacagttcagaaaattttctttcccctgctgttccgtactcaaacccttttcttaccatcagcgatgggtccagccggtaaagcagataaaacaaattgttagcgtatcctgctgctatcgtaccggtaagcgccaactgccattttgacgactttataatgtcatgcatggcaagcccctgcgcactaccgcctcctttatatcgcgataggtaatgttttgcccaaataaaaaaagataccctcgtatctttaaaaagtttgctattattgctactgctctgccagcctgtcttccaaattccggataatcctatcaacatcacatgcttcataactgctggaaaaaggaaagccggctgcatagagtgaatcttcaataatcctgctttgtgctccttttgtaagcaataaaataaccagggaataaaatttttccttctgcagctcctttaaaatccgtagatattcttccggtgggatttctgctgcatccgacaggcatatgcactgccaggtttccctgttttcttctatccatttcagcaggttgtctgctgattttttctggtacttttcatctttcttcaaccgtaccactccttcatcaattcttaggctccacattttcccccacgccaaaccgtgcgtgccgctttcacgatacacggctttccatcatatcaaatatgactagcggcctttgccctgtggccggctttcccggaactagccctgttttgggctgcctgctttcactggacttgcaccagttcacaccatatagcacatctctgtactatatagcccagcacctctgactactacgccgcctctgccaccggacccccacttcaatcaggatatccatccgttaaaaacggccgggtgtccggcttctccagtcccttaaactgctctttacagcttacccttagattcttactataccccggataatgtcctacggcattttctgcatcaaccatagaacggcgcacatcaatgtgcgtcatgatgctgcaatgaacagacagcatcaccttatctttccaagccataattttacggaaaccagaagcttacggggcttgcataagtttgtcttcctaatcataggtaaacacaaggatagccctgacttgaacctatggctgattcaaacaggtacatttcaccgagcttcacaccctgcccctcctgtaagacagcgcatgtcggtatatccgaggcctgatgcagttcagacctgcatttataaatgcctgcatgtttaaagttagctggactcacattcatgtgcttcatctatgatagcaacatcaaaaaaacccttcaactgtttcttaatataccttgccggggcatattttcttggaccataaacatttgggtactctatatcttcttccctgatgttattcacaaggatatactcatcaatttcctgccggtagacccaagcggtttttcttccttttcttgtcttgttcgcataatgggacatccggatccacttttgccttttctttttatttttgggtgcaaaaaaagtctggtcgagcggtgtgcagcttggctgccacagcgctgagccgcaatgcctgcaggttctgtttgaggacgtctgagacgcaaaatccagcggcaacagagctttatgtctgtcctctttctctggatccagcttcagtctcgttacatcagcagggaacagcagttcaccgcattccggacagatcagaccctccgcaacgtaaccttgtgggctaagataccattgattggacccacaactgcaccgtttgcgcaaatctttcggcctttgttccccgcattcctcacagacatattgttttacttccttatattttatctgtgttggtattggagcatacatataagatagtttgcccaaatctttgctcatgatataaaactctttacaggtcctctccttccctttcttttttaattttatcagctctttcagcccccggacaatcgttactctggcatacggtatatcttcccggatggaagcagcccatttttcaaccaaatgggaggggcacataataaaattacgaaattttatagcctccctgtccagatacaaatccttaagtatcttatccggatgtgatttcaaatatctccggttaaaaaacccctcaaccaccgccagggaaatcagtgtcttgcccgtccccatatccaaattctctatcccgtaggaacgatggttcatattttcaatcaatccattggctatcgctgcttgttgtggataaagccgtttatgaaggaatgcaacctcatccaggttttctttcagcggaaccagtggatccagtttattttcaagattctctaccaaagtatgtccatagtttttaaaataatcgtccatgttctggaattgtagttcattttgttctttttcggaaatccagatttttttgtcctttaatccgctactgacaatgtcctccagatccttatctgtaagcatgcattcatataccaccagtttcctgttctgtgactgaaattcactgatatcgctgtagcatttcacatcgcatttttttaattttccctggctgtttgcaagtatataaggtatccattctttcagcaatggtaatgtaaagtggttcatcaggtattggtacatatcattcatttgtccggcttcatccgttataataaagtgattctcaatttttttggatatactgactccatgatgcacatactctctaccattgcttagctttgtaaaataactgtccacttcacaaggctcaaaagaatccacgacagtttcattgcctgaatataatagtacctttgttttgcctacattggcagcaaaacctctgacagcagattcgctgcgatggtaaaaggcataaagcaaggcctgcttacctgatgatcctgccaccatgactgcatattccagatatgccgtaataccatttacataaagctccatacttcctccttttatgaatcccttttcccaatacctaactcaatgttgtgatacgaccgctattttcaaccaatttataagagatctgggaatactgtgttacaacctctgtcatttttcctttctcattgttccggtattcgcttttctcctctactttgaccacacctctttgcaaatgtaaatccccattttcttctgaaccgaccaatccctgccctccgccgcttacagccagcagatacatttgtccatctgagggtgtaataatcggccgacccaaatcatctaccacatatttaggcaccttcagctttttctcgattacctcccgcagcgggcttttgctaagacattttctggcccggatggcatcaaattccctggtcgtatacgtagtaatgttgttcggaccggatggcattactttgaccttttcaccttcataaaatgcaggaagttctgcaattgtttcctcgtttgagaccattttcaataccctctccagctcctgacctgtattgcctgccttcctgaatgtaccgattatcacgacctgcttccatttttcatattcgtctctatgaaaccggtaaagaaacttggtgtcgaatgcaccacaccattgtttcaggaaagatagatccctgcagacattttcaggtagaacataaactacaactgcattattcgtcaaataaggtttcagttttgccaaaaaaagcgtctccttcctgcttttttccaactccccataaggcgggttgacaaaagcaaaagaaaacgctttatgactgatcagtacccctgtcaaaaagtctgttgcaaggcaatcttctatttccttattttccataacctcttcccaagtatcacggttaagttccacaccaaaaaccttaatattatctctgtttttattctttccggttattgtcaatatggctgaagcatcgccgatacttgggtcaatacagcacacctccctgtcttctggaaagtccaatagattcctgatccacctgcagtgttctaaatctgtgtagtaagcgcctagagcagcttcattctgtaagctctgtttgaagccacactgtttcttgatttgatcttccaaatttaatatcctccttttattttttcatcaatcctgtattcagctttaaaaatacgcacaaaaaaaccacccataaggtggctcttgatttactttatacctgtttccaggaattcataaaactatagcgctgccgaaaggcgtagcttcatttaagaattgattatagttagtttaacaccgttttcgtgtttttgcaatcatactcttaaaacaaaatagtcaccacggcagacaatgccagatgactatttgcctctttacagttgaccggctatattccgaaacgctccataaactgcctccctgtcaatataattcctccgcagaccatataaatcactctgtctattgccatctatgtgctggtctaactcatccatcagtgcatccatataccctttataactttcatgaaacaagttcttcattgaatctgtgatatcagactgtgcaagacctatcttcagttcctgatactcttctgccagcttccttcccagggcattgtcatccgtatcattgtaagttcttccgttccaatatgtaagctcctcatttaatgtctttgcataaatgccagcaaacttcagatccccaaagctaaaggtactatcgccaaatgattgctctccctctttccggggcatggcttcacgtaactgcgctgccatgaagccatcgtcctgatatagccactgctcatcttgatccatgatttcggaataactatttcctttttctaaaatatggtttccataatcatcagcccgctggtctatagctgtcagcagactatctctcatatcttctgctacgccctgctgtcccatatcctcaaaaaacccgccaatactttctacgaaggaatctgccagaatatctttagcatttttgtaaatgtcgttcagaattgatatttgctcttctttttcatcaccggcatactctgtctcaatacggttttttaatacagcatatctcgaagcaagataatctgtcttcatctctaacttttgagcattgccgaaatcgatactgtttaagtacaaatcactttttacgccttcccagtctatttcatttccaagaccattttttatcaggccctgcctaaaagtctccagttcatcagcacttaccaaatcaggggcaaacagacgtcctccctccccttctccagccacatattgtcccgtttcatcttttatcaaatgtacatcaaggcggaattgttttccgtattgatttaataaagcatcttctttcgtatatccccgttcagaagggggaatcagttcctttttcaaatctggcatctctgtcttatccgcataggtgattttttctggcgtcagatggcttagacgattgcttctctgataaatgccaatattaggcgtgtcatatgtatttctaaatgatatagcatcgcggttattcttccgttcagtattgttcggctggttctttaaacggtttactgattgtctcaaaaagggtaactgattggtagaataagcgccaattcgaccaacaaacatatctttcacctctcttctacttattttcatactatatatatcgactcctatcctcaagacataagaatctataaatctactttatctgaataaatgacatttgaatttacctatagtttaatatgctttctttttcactgctgttccccggcattgcaaatgcgctgcactcttcccactatatttccctcttccagcataacctttatcccgcgtggatgtgtaggcgaatttgtcagaattcgtttcacatgcccttttgttaagatacctgtcttctggtccttcttttgaacaatttctacttctattccctgcttaatattttttctgacctttccgtccatacaaatgctctcctttacaataatgatttttacagtataccacaggtaccgtccataaactggtctttttggtcgctgttttatgtaataaatcccatattagataattagagcttcactttgctttttttgcctttttacgttataatcattttaatcgaaagaaatacagataggagtagttattatgccttatccacgccaatttatctcatccctggctccacaggtggacgatcgtttgatagatttttatacatccggcaaggaaatttataactttccagtttcagatatgaatgagtttattgatatcactttgcaggattacttaaaagaagaaactggccggacagaaatcaagagtatttattctacacagatgcgcatgcggaggcaaaagaagactcgctggagaaatgctgcacgagaatctactaatatagatatatccagtaaaaaaaatgcgtttcactacctgttggaccaacgaaacatccttagcgccatgcagtttaaaaaattgtatggttcttctgacataaataaagtgatacaaaaattattgctggaaatcgatgaatggcaggcggattcatcttcttacctcattgactacccacttacccagactaagaaccagctatttaagtctcttaaaaatgaccttttcataaacctagtggatattatcaatacaaattttgaaggcagtatcgatacttttattcgccgcaaaccagacgccctaattgatatgccgcttttttctccggcaacatattccattcccctccaggaatcgttggatgctttaactgccggtttgtttcgtaacgaagaaatggaaattgatatttccctgcccaagaatccagacgaacctgattcagattccaaaaaatttaaggtactcgatcccaaggataatcagattcttttatgcttaatgaataacatcaagtccgatttctatgacagtaaacaagtgattctggagattggcaccatagcaagagatcttaacgcccgcccgaatgccaagcattatgagatggttgtatcccgtttatataacatgagtaagattaattttacttataaaacaaaagagaaaaacggaacaggtatcgcctttaatatctttgattccattcagatagagaaaggtccggatgggcatcgatactgtaaagctacttttggcaatattctggcagacgccattattaaggaaaaaatggtgggtgtaacccttagaaattataatgctctggaacttgatttgagcaagctactatatcatgctttgcaaagggaaagaatccgcttatcaatgtctactccagacgataaaaacgatgctctgttatgtaagcactatgatttttctttttttcagcgaactgtattgtttaaacagaaaaaaaaagaaaaaaatgttgctttaatcaagcagacattggacgaatttcagtgcaaaggtattgcgatccaccactatacggtacaaaacaacaattttgatatctattacttcccgttgacccctgatgaaaaagctgatttatttatggattataataatcacagcaatccggtactggatgttactgaggagtctatataaagaaaaacaggatgagcactttggtgttcctcctgttttttaatgctcttcttttattcgctttttaaagcacaaaaatgatacctttttgtacgaccaattattgaaaatagtattttcttatcgtttagttcgtttttcttcgctgtatacctatctcttatcataaaattcctaccaaaaatttaatctgatttagtttttaatacctatttttgcgacctattttatctttttttaattttgatacctttttctacgataaattactcatttttaaaaattgatacctgattatacgacattctatataaaaaggttatggaaacttctttcttgaaggaaaccttaagaataaagataggtaacatttcccaaaaatctaatcttatatactgatagcagcgtaaaaagacatgttttcgctaccttactcacttgtaatggtcgttaaattaggtatctgttttcaaaaacggcataatttttcttattatggtaatatgtcgcaaaaataggtatcaaaatatctaagtctaatatagtcgttaaaaatggtatcactttttaaaaaaatgtctttagtcattaaaataggtaagattttattatatataatgattctctccatatttattccttattttttgatacctaatcttacgaccaataactgatattcaaattttttaagaattttattttttttgatacctatttttacgacatttattaaaaatgatgcctttttacacgccaaaaataattatccataaatttgatacccttttggacgaccaataccaaaatatctctattttttataaattaaaaaacatcaatgtaaagttaaatatacgtcttttgataccttttttaacgatattttccaaattaataattaaaatcatcatttatctgacttttgatacctaataaaacgaccaaattttaacaaattattttttattatattttgaaatccgaaaaatacaacgatttttttaaatgatacctttttttacgcccctttttttacttgtgattttgctatattttgtggtttttattataaaagataccttatcttgcgacttttcgggtctatttacttttttttggacattgtttataatccaaattagaactaagaagtggagggctgtatcttgattacattaagtaacttcagccgcatcggaaagggtgttctttcacggtgtattggactacaaaaaaatcacaaagaaataatcaaaaccggagtggtaaagatagatgaggcccagtccggctgttttaattgtccaattcataggctgaagcaggaacttcatcttctggatctccctgatgaagtctcaaaattagacgaaatgtgccatacctgcagcaccgctgtctggcagcaacaatataccattcaatacaggaatgaaaaaaaccgatatggataccagccccggctcaaatccaatgcaattaaactgcttctttgctaccactttctgcagcctgatgccaatggattgattaaggacatcagcctcaaggatttagcagaacttttaaactgtgatattaagactatccagaataacaacgccatactatctgagtatggctattgctatttctctaattccggctggtatgataaccatattaacatattattgccggaatataaatcataccataaaactgcctctgaaggaggccgtggctatatgactttctctaaaaatattttagaggaattattgaacttcaccgatttaaaccagatccgtttaatcataaagggactgcttgagacagataaccagtctattactggaaaaaatccgcaagtaaaagtttcttatgcctacctcaagggattcatgcccgattactgtaaacggggcatcattcagcaggctttaaatagattaactaacaatccaatcttacagatcagtgcagattcggaacacgtggaattcatcctagaccctgcatatgacggcaagaaactccgcaaagagctccaggtagaaaaatataaggaaatggaagattacatcagctctctcaatgatttctttgaagctgctggatctgctctgcctcctgacaaggaaggcattgatattgccctcggtacgatgaacatagccactgccgctacatatcaactaattatcttacaaaagaaagactatcaggatttatctggattatgcgtacagtattctgcttccgctactaagcatgccattacaagtatatataatcagtatatcaattgcagtggcaagcgggaagcaatccgtaacttcggaggtctcgtaagaacaactatagaaaaacaactgtcatccatttctttaattgcttcataaacttgaggtttatttgtcatgcccttttttcctctatccccccttttttccatacaaaatccgatttattacatctaggacgccatatttttctttttgagtcccaaatggagcttttctttttttccacagaaagaaagttttcatccttttttataacttttaatcctttgaagaatattttcatcataattataaatatttcatcattccaccgataatttcatccatgttatgttaagattcatccaataggataacttttcattgacactcagaaacaactctccttactatatattgggtaatcccttaaaatatgcggctttgaggcgtttctttttatcaattattgttttaatatatgtattaattattgttttaattatggataattatatgaatatgtaaagagactttcctatcatttatttttcaataagaaaaaaagaactgaataagaactaaat
